(19) United States
(12) Patent Application Publication
(10) Pub. No.: US 2025/0051413 A1
(43) Pub. Date: Feb. 13, 2025

(54) CHIMERIC MOLECULES COMPRISING IL-12 AGONIST POLYPEPTIDE

(71) Applicant: AskGene Pharma Inc., Camarillo, CA (US)

(72) Inventors: Yuefeng Lu, Newbury Park, CA (US); Chunxiao Yu, Santa Barbara, CA (US); Liqin Liu, Camarillo, CA (US)

(73) Assignee: AskGene Pharma Inc., Camarillo, CA (US)

(21) Appl. No.: 18/272,095

(22) PCT Filed: Jan. 12, 2022
(86) PCT No.: PCT/US2022/012202

§ 371 Date: Jul. 12, 2023

Related U.S. Application Data
(60) Provisional application No. 63/136,640, filed on Jan. 12, 2021.
(60) Provisional application No. 63/137,681, filed on Jan. 14, 2021.
(60) Provisional application No. 63/176,285, filed on Apr. 17, 2021.
(60) Provisional application No. 63/233,222, filed on Aug. 14, 2021.

(51) Int. Cl. C07K 14/54; A61K 38/00; C07K 16/24; C07K 16/28

(52) U.S. Cl. CPC C07K 14/5434; C07K 16/244; C07K 16/2818; A61K 38/00; C07K 2317/569; C07K 2319/50

(57) ABSTRACT

The present application relates to novel chimeric molecules or prodrugs of IL-12. Specifically, disclosed provides a chimeric molecule, which comprises an IL-12 p40 subunit (p40), an IL-12 p35 subunit (p35), and which may further comprises a masking moiety (MM), and/or a carrier (C). Further included in the present application are methods of making and using the novel chimeric molecules or prodrugs.

### CROSS REFERENCE TO RELATED APPLICATION

[0001] The present application claims priority to U.S. Provisional Application No. 63/136,640 filed on Jan. 12, 2021, U.S. Provisional Application No. 63/137,681 filed on Jan. 14, 2021, U.S. Provisional Application No. 63/176,285 filed on Apr. 17, 2021, U.S. Provisional Application No. 63/233,222 filed on Aug. 14, 2021, the contents of which are incorporated herein by reference in their entirety.

### REFERENCE TO SEQUENCE LISTING

[0002] The entire content of the following electronic submission of the sequence listing via the USPTO EFS-WEB server, as authorized and set forth in MPEP § 1730 II.B.2(a)(C), is hereby expressly incorporated by reference in its entirety for all purposes. The sequence listing is identified on the electronically filed text file as follows: File Name: AG3-026WO_ST25; Date of Creation: Jan. 11, 2022; Size (bytes): 639 KB.

### FIELD OF THE INVENTION

[0003] The present application relates to novel chimeric molecules or prodrugs of IL-12. Further included in the present application are methods of making and using the novel chimeric molecules or prodrugs.

### BACKGROUND

[0004] IL-12 comprises two subunits, P40 and P35, and plays important roles in immunology (Watford W T et al, Cytokine Growth Factor Rev. 2003 October; 14(5):361-8). It stimulates interferon gamma release and stimulates T cells and NK cells (Del Vecchio M, Clin Cancer Res. 2007 Aug. 15; 13(16):4677-85). IL-12 receptor consists of two subunits, IL-12 receptor beta 1 (IL12Rβ1) and beta 2 (IL12Rβ2). Deficiency of IL12Rβ1 impaired IL-12 signal pathway and may have led to bacterial infection and in one case Sjögren's Syndrome (Sogkas et al., Front Immunol. 2017; 8: 885).

[0005] IL-12 has also been explored as potential drug to treat cancer (Colombo M P and Trinchieri G. 2002, Cytokine Growth Factor Rev 13(2):155-168; Del Vecchio M, Clin Cancer Res. 2007 Aug. 15; 13(16):4677-85; Lasek et al, Cancer Immunol Immunother. 2014; 63(5): 419-435).

[0006] There is a need to develop IL-12-based-based cancer therapeutics which are more tumor site-selective, has less severe side effects, and/or has improved efficacy.

[0007] The disclosures of all publications, patents, and patent applications referred to herein are each hereby incorporated herein by reference in their entireties.

### SUMMARY OF THE INVENTION

[0008] Described here are novel chimeric molecules which comprise an IL-12 agonist molecule, which comprises an IL-12 p40 subunit (p40), an IL-12 p35 subunit (p35), a masking moiety (MM), and a carrier (C). In some embodiment, said chimeric molecule comprises a p40 mutein, wherein said p40 subunit comprises a mutation, mutations, or a deletion of one or more amino acids. In some embodiment, said chimeric molecule comprises a p35 mutein, wherein said p35 subunit comprises one or more point mutations. In some embodiment, both the p40 and the p35 subunits of the chimeric molecules contain and/or have a mutation or mutations. In some embodiments, said mutation or mutations in the p40 subunit and/or the p35 subunit reduce a biological activity of said chimeric molecule compared to the chimeric molecule with the wild type p40 and p35 subunits. In some embodiments, said p40 subunit comprises the mutations Lys260Ala and Arg261Ala (numbering according to SEQ ID NO: 5). In some embodiments, said p35 subunit comprises a mutation at Tyr40 (numbering according to SEQ ID NO: 6). In an embodiment, p35 subunit comprises the mutation Tyr40Ala (numbering according to SEQ ID NO: 6).

[0009] In an aspect, a chimeric molecule comprises a masking moiety (MM) which inhibits the binding of the IL-12 cytokine moiety with an IL-12 receptor β1 subunit, while said p35 subunit comprises a mutation or mutations which reduce the binding affinity of the cytokine moiety with the IL-12 receptor β2 subunit. In another embodiment, said p35 subunit comprises a mutation at Tyr40 (numbering according to SEQ ID NO: 6). In an embodiment, said p35 subunit comprises the mutation Tyr40Ala (numbering according to SEQ ID NO: 6).

[0010] In an aspect, a chimeric molecule is a prodrug, which is/are activatable at the site of a tumor, in the tumor microenvironment, or near a tumor. In some embodiments, the carrier moiety of said chimeric molecule comprises an antigen-binding moiety, which binds to an antigen expressed on an immune cell. In another embodiment, an immune cell is infiltered into a tumor or in the tumor microenvironment or locates near a tumor. In some embodiment, said chimeric molecule has a higher activity stimulating an immune cell expressing said antigen targeted by the antigen-binding moiety compared to an immune cell without expressing said antigen. In some embodiment, the EC50 of the chimeric molecule stimulating an immune cell expressing the targeted antigen is at least two times smaller, at least 5 times smaller, or at least 10 times smaller compared to the EC50 of said chimeric molecule stimulating an immune cell without expressing said antigen. In another embodiment, said chimeric molecule is activated even though the chimeric molecule does not comprise a cleavable peptide linker or it comprises a cleavable peptide linker but said cleavable linker is not cleaved. In some embodiments, said chimeric molecule: (a) comprises an IL-12 cytokine moiety, a masking moiety, and a carrier which comprises an antigen-binding moiety which binds to antigen expressed on an immune cell; (b) does not comprises any cleavable peptide linker; and (c) is able to activate an immune cell which expresses an antigen targeted by the carrier. In some embodiment, said antigen is selected from PD-1, TIM-3, TIGIT, LAG-3, CD16A, NKG2A, NKG2D, KIR, SIRPalpha, and NKp46. In some embodiments, said carrier comprises an antigen-binding moiety which binds to PD-1; wherein said antigen-binding moiety comprises the same heavy chain variable domain (VH) and the same light chain variable domain (VL) as that of pembrolizumab or nivolumab. In some embodiments, said VH domain comprises an amino acid sequence of SEQ ID NO: 101 or at least 90% identical as that of SEQ ID NO: 101, and said VL domain comprises an amino acid sequence of SEQ ID NO: 102 or at least 90% identical as that of SEQ ID NO: 102. In an embodiment, said carrier comprises an antigen-binding moiety which binds to LAG-3; wherein said LAG-3-binding moiety comprises an amino acid sequence selected from SEQ ID NOs: 69-77, or at least 90% identical to one selected from SEQ ID NOs: 69-77.

[0011] In another embodiment, said chimeric molecule comprises an IL-12 p40 subunit (p40), an IL-12 p35 subunit (p35), a masking moiety (MM), a carrier (C), and a cleavable peptide linker which is cleavable by a protease preferentially expressed at the site of a tumor, in the tumor microenvironment, or near a tumor. In some embodiment, said carrier comprises an Fc domain of an IgG; wherein said masking moiety is linked directly or indirectly to the carrier through a non-cleavable peptide linker; and wherein said p40 subunit of IL-12 is linked to the carrier directly or indirectly through a cleavable peptide linker. In some embodiment, said carrier comprises an antigen-binding moiety; wherein said masking moiety is linked directly or indirectly to the carrier through a cleavable peptide linker; and wherein said p40 subunit of IL-12 is linked to the carrier directly or indirectly optionally through a non-cleavable peptide linker.

[0012] In an aspect, a chimeric molecule comprises an IL-12 p40 subunit (p40), an IL-12 p35 subunit (p35), a masking moiety (MM), and a carrier (C); wherein said masking moiety is directly fused to the carrier optionally through a cleavable or non-cleavable peptide linker; wherein said p40 subunit is directly fused to the carrier optionally through a cleavable or non-cleavable peptide linker; and wherein said p35 subunit is fused to the p40 subunit through a peptide linker of 3, 4, 5, 6, 7, 8, 9, or 10 amino acids. In some embodiment, said p35 subunit is fused to the p40 subunit through a peptide linker comprising GGGGS or GGGGSGGGGS.

[0013] In another aspect, a chimeric molecule comprises an IL-12 p40 subunit (p40), an IL-12 p35 subunit (p35), a masking moiety (MM), and a carrier (C); wherein:
[0014] a. said IL-12 subunit p40 has an amino acid sequence SEQ ID NO: 5 or at least 95% identical to that of SEQ ID NO: 5;
[0015] b. said IL-12 subunit p35 has an amino acid sequence SEQ ID NO: 6 or at least 95% identical to that of SEQ ID NO: 6;
[0016] c. said masking moiety comprises an amino acid sequence of SEQ ID NO: 1, 2, 3 or 4 or at least 95% identical to that of SEQ ID NO: 1, 2, 3 or 4;
[0017] d. said carrier is selected from an albumin or albumin fragment, an Fc domain, and an antibody; and
[0018] e. said IL-12 p40 subunit comprises one or more mutations at the site or sites selected from Lys258, Ser259, Lys260, Arg261, Lys263, Lys264, and Asp265, and Arg266 (numbering according to SEQ ID NO: 5).

[0019] In some aspect, a chimeric molecule comprises an IL-12 p40 subunit (p40), an IL-12 p35 subunit (p35), a masking moiety (MM), and a carrier (C); wherein:
[0020] a. said IL-12 subunit p40 has an amino acid sequence SEQ ID NO: 5 or at least 95% identical to that of SEQ ID NO: 5;
[0021] b. said IL-12 subunit p35 has an amino acid sequence SEQ ID NO: 6 or at least 95% identical to that of SEQ ID NO: 6;
[0022] c. said masking moiety comprises an amino acid sequence of SEQ ID NO: 1, 2, 3 or 4 or at least 95% identical to that of SEQ ID NO: 1, 2, 3 or 4;
[0023] d. said carrier is selected from an albumin or albumin fragment, an Fc domain, and an antibody; and
[0024] e. said IL-12 p40 subunit comprises mutations Lys260Ala and Arg261Ala (numbering according to SEQ ID NO: 5).

[0025] In another aspect, a chimeric molecule comprises an IL-12 p40 subunit (p40), an IL-12 p35 subunit (p35), a masking moiety (MM), and a carrier (C); wherein:
[0026] a. said IL-12 subunit p40 has an amino acid sequence SEQ ID NO: 46, 63, or 98 or at least 99% identical to that of SEQ ID NO: 46, 63, or 98;
[0027] b. said IL-12 subunit p35 has an amino acid sequence SEQ ID NO: 6 or at least 95% identical to that of SEQ ID NO: 6;
[0028] c. said masking moiety comprises an amino acid sequence of SEQ ID NO: 1, 2, 3 or 4 or at least 95% identical to that of SEQ ID NO: 1, 2, 3 or 4; and
[0029] d. said carrier is selected from an albumin or albumin fragment, an Fc domain, and an antibody.

[0030] In an embodiment, a chimeric molecule is one selected from any of the above, wherein:
[0031] a. said masking moiety is linked to the carrier through a cleavable linker, a non-cleavable linker or without a peptide linker;
[0032] b. said p40 subunit is fused to the carrier through a non-cleavable linker or without a peptide linker; and
[0033] c. said p35 subunit is fused to the p40 subunit through a non-cleavable linker or without a peptide linker.

[0034] In some embodiments, said chimeric molecule comprises a first polypeptide chain and a second polypeptide chain; wherein a first polypeptide chain comprises an amino acid sequence of SEQ ID NO: 80 or at least 90% identical as that of SEQ ID NO: 80, and a second polypeptide chain comprises an amino acid sequence of SEQ ID NO: 81 or at least 90% identical as that of SEQ ID NO: 81.

[0035] In an embodiment, said chimeric molecule further comprises an antigen-binding moiety which binds to CD40, OX40, GITR, 4-1BB, CD16A, NKG2A, or NKG2D.

[0036] In another embodiment, a chimeric molecule further comprises one or more copies of an ectodomain or extracellular domain (ECD) of the CD40 ligand (CD40L), the OX40 ligand (OX40L), the GITR ligand (GITRL), the 4-1 BB ligand (4-1 BBL), a ligand for NKG2D or its analog, CD47, or SIRPα.

[0037] In some embodiments, a chimeric molecule further comprises an ectodomain of CD40L, which comprises an amino acid sequence of SEQ ID NO: 7 or at least 90% identical as that of SEQ ID NO: 7.

[0038] In an embodiment, a chimeric molecule further comprises an antigen binding moiety, which binds to an antigen expressed on the surfaced of a tumor cell, a cancer cell, or an immune cell.

[0039] In an embodiment, a chimeric molecule further comprises an antigen binding moiety, which binds to an antigen selected from PD-1, PD-L1, CD47, CD16a, NKG2D, NKG2A, SIRPα, Siglec-10, TIGIT, TIM-3, LAG-3, 5T4, FAP, EGFR, CMET, HER2, Trop-2, VEGFR2, ROR1, mesothelin, GPC-3, CD20, CD38, and BCMA.

[0040] In another embodiment, a chimeric molecule further comprises an antigen binding moiety, which binds to LAG-3; wherein said LAG-3-binding moiety is a single domain antibody, which comprises an amino acid sequence selected from SEQ ID NOs: 69-77, or at least 90% identical to one selected from SEQ ID NOs: 69-77.

[0041] In some embodiments, a chimeric molecule further comprises an antigen binding moiety, which binds to a PD-1; wherein said PD-1-binding moiety is an antibody or a binding fragment thereof, which comprises a heavy chain variable domain (VH) with an amino acid sequence of SEQ ID NO: 101 or at least 95% identical as that of SEQ ID NO: 101, and a light chain variable domain (VL) with an amino acid sequence of SEQ ID NO: 102 or at least 95% identical as that of SEQ ID NO: 102.

[0042] In an embodiment, a p35 subunit of any of above said chimeric molecule comprises one or more mutations selected from K128A, F166K, E38A, F39A, Y40A, T43A, S44G, E45A, E46A, D48A, H49A, E50A, E79A, T80A, F82A, and N71Q (numbering according to SEQ ID NO: 6). In some embodiment, said p35 subunit comprises double mutations selected from E38A/F39A, T43A/S44G, E45A/E46A, D48A/H49A, and E79A/T80A (numbering according to SEQ ID NO: 6).

[0043] In another aspect, a chimeric molecule comprises an IL-12 p40 subunit (p40), an IL-12 p35 subunit (p35), and a carrier (C); wherein said p35 comprises one or more mutations selected from K128A, F166K, T36A, L37E, E38A, F39A, E38A, F39A, Y40A, P41G, T43A, S44G, E45A, E46A, D48A, H49A, E50A, E79A, T80A, F82A, and N71Q (numbering according to SEQ ID NO: 6); and wherein said carrier is selected from an albumin or albumin fragment, an Fc domain, and an antibody or a binding fragment thereof.

[0044] In an aspect, a chimeric molecule comprises an IL-12 p40 subunit (p40), an IL-12 p35 subunit (p35), and a carrier (C); wherein said p35 comprises double mutations selected from E38A/F39A, T43A/S44G, E45A/E46A, D48A/H49A, and E79A/T80A (numbering according to SEQ ID NO: 6); and wherein said carrier is selected from an albumin or albumin fragment, an Fc domain, and an antibody or a binding fragment thereof.

[0045] In some embodiments, a chimeric molecule further comprises a masking moiety (MM); wherein: (a) an IL-12 subunit p40 has an amino acid sequence SEQ ID NO: 5 or at least 95% identical to that of SEQ ID NO: 5; and (b) a masking moiety comprises a binding moiety comprising an amino acid sequence of SEQ ID NO: 1, 2, 3 or 4 or at least 95% identical to that of SEQ ID NO: 1, 2, 3 or 4. In an embodiment, a chimeric molecule further comprises a masking moiety (MM); wherein: (a) a masking moiety is linked to the carrier through a cleavable linker, a non-cleavable linker or without a peptide linker; (b) a p40 subunit is fused to the carrier through a cleavable peptide linker, a non-cleavable peptide linker or without a peptide linker; and (c) a p35 subunit is fused to the p40 subunit through a non-cleavable linker or without a peptide linker.

[0046] In another embodiment, a carrier comprises an antigen-binding moiety, which binds to an antigen selected from PD-1, PD-L1, CD47, CD16a, NKG2D, SIRPα, Siglet-10, TIGIT, TIM-3, LAG-3, 5T4, FAP, EGFR, CMET, HER2, Trop-2, VEGFR2, ROR1, mesothelin, GPC-3, CD20, CD38, and BCMA.

[0047] In an embodiment, a carrier comprises an antigen-binding moiety, which binds to LAG-3; wherein said LAG-3-binding moiety is a single domain antibody, which comprises an amino acid sequence selected from SEQ ID NOs: 69-77, or at least 90% identical to one selected from SEQ ID NOs: 69-77.

[0048] In another embodiment, a carrier comprises an antigen-binding moiety, which binds to PD-1; wherein a PD-1-binding moiety is an antibody or a binding fragment thereof, which comprises a VH domain with an amino acid sequence of SEQ ID NO: 101 or at least 95% identical as that of SEQ ID NO: 101, and a VL domain an amino acid sequence of SEQ ID NO: 102 or at least 95% identical as that of SEQ ID NO: 102.

[0049] In some embodiments, a carrier comprises an antigen-binding moiety, which binds to 5T4; wherein said 5T4-binding moiety is an antibody or a binding fragment thereof, which comprises a VH domain with an amino acid sequence of SEQ ID NO: 78 or at least 95% identical as that of SEQ ID NO: 78, and a VL domain an amino acid sequence of SEQ ID NO: 79 or at least 95% identical as that of SEQ ID NO: 79.

[0050] A chimeric molecule, which comprises a first polypeptide chain and a second polypeptide chain; wherein a first polypeptide chain comprises an amino acid sequence of SEQ ID NO: 97 or an amino acid sequence at least 99% identical as that of SEQ ID NO: 97; and wherein a second polypeptide chain comprises an amino acid sequence selected from SEQ ID NOs: 82-96, and 99 or an amino acid sequence at least 99% identical as one selected from SEQ ID NOs: 82-96, and 99.

[0051] In some embodiment, said chimeric molecule comprises two or more polypeptide chains; wherein one of its polypeptide chains comprises an amino acid sequence selected from SEQ ID NOs: 82-96, or an amino acid sequence at least 95% identical as one selected from SEQ ID NOs: 82-96.

[0052] In some embodiment, said chimeric molecule further comprises a masking moiety, wherein said masking moiety comprises an amino acid sequence selected from SEQ ID NOs: 1-4 or at least 90% identical as that of SEQ ID NO: 1-4.

[0053] In some embodiment, said chimeric molecule further comprises an antigen-binding moiety; wherein an antigen-binding moiety binds to an antigen selected from PD-1, PD-L1, CD47, CD16a, NKG2D, NKG2A, SIRPα, Siglec-10, TIGIT, TIM-3, LAG-3, 5T4, FAP, EGFR, CMET, HER2, Trop-2, VEGFR2, ROR1, mesothelin, GPC-3, CD20, CD38, and BCMA.

[0054] In some embodiments, a chimeric molecule binds to LAG-3 and comprises two polypeptide chains; wherein a first polypeptide chain comprises an amino acid sequence selected from SEQ ID NOs: 111-114 or at least 99% identical as one selected from SEQ ID NOs: 111-114; and wherein a second polypeptide chain comprises an amino acid sequence selected from SEQ ID NOs: 115-124 or at least 99% identical as one selected from SEQ ID NO: 115-124. In some embodiment, said chimeric molecule selectively stimulates a LAG-3 positive (LAG-3⁺) immune cell with significantly higher activity than stimulating a LAG-3⁻ immune cell.

[0055] In some aspect, a chimeric molecule comprises an IL-12 p40 subunit (p40), an IL-12 p35 subunit (p35), a masking moiety (MM), and a carrier (C); wherein:
[0056] a. said IL-12 subunit p40 comprising an amino acid sequence of SEQ ID NO: 5 or an amino acid sequence of at least 95% identity to that of SEQ ID NO: 5;
[0057] b. said IL-12 subunit p35 comprising an amino acid sequence of SEQ ID NO: 6 or an amino acid sequence of at least 95% identity to that of SEQ ID NO: 6;
[0058] c. said masking moiety comprises an amino acid sequence of SEQ ID NOS: 1, 2, 3 or 4, wherein the amino acid sequence has a homology of at least 95% identity to that of SEQ ID NO: 1, 2, 3 or 4;
[0059] d. said carrier comprising an antigen-binding moiety which binds to PD-1 and an Fc domain with a first Fc polypeptide and a second Fc polypeptide;
[0060] e. said masking moiety is fused to the C-terminus of the first Fc polypeptide with or without a non-cleavable or cleavable peptide linker; wherein said peptide linker optionally comprises an amino acid sequence of 3 amino acids to 22 amino acids in length;
[0061] f. said p40 subunit is fused to the 2^{nd} Fc polypeptide optionally through a non-cleavable peptide linker; and
[0062] g. said p35 subunit is fused to the C-terminus of the p40 subunit.

[0063] In some embodiment, said chimeric molecule has higher activity stimulating a PD-1 positive (PD-1⁺) T compared to that of stimulating an NK cell.

[0064] In some embodiment, said masking moiety is fused to C-terminus of the first Fc polypeptide with a non-cleavable peptide linker; wherein said non-cleavable peptide linker optionally comprises an amino acid sequence of 3 amino acids to 22 amino acids in length; and wherein said chimeric molecule has higher activity stimulating a PD-1V immune cell than that of stimulating a PD-1 negative (PD-1⁻) immune cell.

[0065] In some embodiment, said p35 subunit is fused to the p40 subunit with a non-cleavable peptide linker of 2-10 amino acids in length, which optionally comprising an amino acid sequence selected from GGS, GGGGS, GGSGGSGGS, or GGGGSGGGGS.

[0066] In some embodiment, said chimeric molecule comprises two polypeptide chains; wherein said first polypeptide chain comprises an amino acid sequence selected from SEQ ID NOs: 103-108 or an amino acid sequence of at least 99% identity to one of SEQ ID NOs: 103-108; and wherein said second polypeptide chain comprises an amino acid sequence selected from SEQ ID NOs: 109 and 110 or an amino acid sequence of at least 99% identity to one of SEQ ID NOs: 109 or 110.

[0067] In some embodiment, said chimeric molecule comprises two identical light chains and a first heavy chain polypeptide chain and a second heavy chain polypeptide chain; wherein said light chains comprise an amino acid sequence of SEQ ID NO: 129 or an amino acid sequence of at least 95% identity to SEQ ID NO: 129; further wherein said first heavy chain polypeptide chain comprises an amino acid sequence selected from SEQ ID NOs: 125-127 or an amino acid sequence of at least 99% identity to SEQ ID NOs: 125-127; and further wherein said second heavy chain polypeptide chain comprises an amino acid sequence as SEQ ID NO: 128 or an amino acid sequence of at least 99% identity to SEQ ID NO: 128.

[0068] In some embodiment, said chimeric molecule comprises two identical light chains and a first heavy chain polypeptide chain, and a second heavy chain polypeptide chain; wherein said light chains comprise an amino acid sequence of SEQ ID NO: 129 or an amino acid sequence of at least 95% identity to SEQ ID NO: 129; wherein said first heavy chain polypeptide chain comprises an amino acid sequence selected from SEQ ID NOs: 130-135 or an amino acid sequence of at least 99% identity to one of SEQ ID NOs: 130-135; and further wherein said second heavy chain polypeptide chain comprises an amino acid sequence of SEQ ID NO: 136 or an amino acid sequence of at least 99% identity to one of SEQ ID NO: 136.

[0069] In some embodiment, said chimeric molecule stimulates a PD-1⁺ immune cell, wherein the stimulation results in a significantly higher activity than that of a PD-1⁻ immune cell; and wherein the EC50 for stimulating said PD-1⁻ immune cell is at least 2 times greater, at least 5 times greater, or at least 10 times greater than that of the PD-1⁺ immune cell.

[0070] In some embodiment, said chimeric molecule has significantly higher activity stimulating a PD-1⁺ T cell expressing and that stimulating an NK cell; wherein the EC50 for stimulating said NK cell is at least 2 times greater, at least 5 times greater, or at least 10 times greater than that of said T cells.

[0071] Also disclosed is a pharmaceutical composition comprising any of the above said chimeric molecules or prodrugs.

[0072] Also presented is a polynucleotide or polynucleotides encoding any one of the above said chimeric molecules or prodrugs.

[0073] Also presented is an expression vector or vectors comprising the above said polynucleotide or polynucleotides.

[0074] Also disclosed is a method of making an antigen-binding molecule of any one of the chimeric molecules, comprising culturing an above said host cell under conditions that allow expression of said chimeric molecule, and isolating said chimeric molecule.

[0075] Also disclosed is a method of treating a cancer or an infectious disease or stimulating the immune system in a patient in need thereof, comprising administering the above said pharmaceutical composition.

[0076] Also presented is a chimeric molecule for use in treating a cancer or an infectious disease or stimulating the immune system in a method disclosed herein. In some embodiment, a cancer is selected from the group consisting of breast cancer, lung cancer, pancreatic cancer, esophageal cancer, medullary thyroid cancer, ovarian cancer, uterine cancer, prostate cancer, testicular cancer, colorectal cancer, and stomach cancer.

[0077] In an embodiment, a method of treating of a patient with cancer, comprises administering said pharmaceutical composition of the present invention directly into a tumor or tumors.

### BRIEF DESCRIPTION OF THE DRAWINGS

[0078] FIGS. 1A, 1B, 1C, and 1D show illustrations of the structure of an IL-12 chimeric molecule comprising an IL-12 p40 subunit (p40), an IL-12 p35 subunit (p35), a masking moiety, and an Fc domain. FIGS. 1A and 1B show the IL-12 subunits and the masking moiety fused to the C-termini the Fc domain polypeptide chains. FIGS. 1C and 1D show the IL-12 subunits and the masking moiety fused to the N-termini the Fc domain polypeptide chains.

[0079] FIGS. 2A, 2B, 2C, and 2D show illustrations of the structure of an IL-12 chimeric molecule comprising an IL-12 p40 subunit (p40), an IL-12 p35 subunit (p35), a first masking moiety, a second masking moiety and an Fc domain. FIGS. 2A and 2B show the IL-12 subunits and the masking moieties fused to the C-termini the Fc domain polypeptide chains. FIGS. 2C and 2D show the IL-12 subunits and the masking moieties fused to the N-termini the Fc domain polypeptide chains.

[0080] FIGS. 3A, 3B, 3C, and 3D show illustrations of the structure of an IL-12 chimeric molecule comprising an IL-12 p40 subunit (p40), an IL-12 p35 subunit (p35), a masking moiety, an Fc domain, and 2-6 copies of CD40L ectodomain. FIGS. 3A and 3B show the IL-12 subunits and the masking moiety fused to the C-termini the Fc domain polypeptide chains; and the CD40L ectodomains are fused to the N-termini of the Fc domain. FIGS. 3C and 3D show the IL-12 subunits and the masking moiety fused to the N-termini the Fc domain polypeptide chains; and the CD40L ectodomains are fused to the C-termini of the Fc domain.

[0081] FIGS. 4A, 4B, 4C, and 4D show illustrations of the structure of an IL-12 chimeric molecule comprising an IL-12 p40 subunit (p40), an IL-12 p35 subunit (p35), a first masking moiety, a second masking moiety, an Fc domain, and 2-6 copies of CD40L ectodomains. FIGS. 4A and 4B show the IL-12 subunits and the masking moiety fused to the C-termini the Fc domain polypeptide chains; and the CD40L ectodomains are fused to the N-termini of the Fc domain. FIGS. 4C and 4D show the IL-12 subunits and the masking moiety fused to the N-termini the Fc domain polypeptide chains; and the CD40L ectodomains are fused to the C-termini of the Fc domain.

[0082] FIGS. 5A, 5B, 5C, and 5D show illustrations of the structure of an IL-12 chimeric molecule comprising an IL-12 p40 subunit (p40), an IL-12 p35 subunit (p35), a masking moiety, an Fc domain, 1-3 copies of CD40L ectodomain, and an antigen-binding moiety. FIGS. 5A and 5B show the IL-12 subunits and the masking moiety fused to the C-termini the Fc domain polypeptide chains; and the CD40L ectodomains and the antigen-binding moiety are fused to the N-termini of the Fc domain. FIGS. 5C and 5D show the IL-12 subunits and the masking moiety fused to the N-termini the Fc domain polypeptide chains; and the CD40L ectodomains and the antigen-binding moiety are fused to the C-termini of the Fc domain.

[0083] FIGS. 6A, 6B, 6C, and 6D show illustrations of the structure of an IL-12 chimeric molecule comprising an IL-12 p40 subunit (p40), an IL-12 p35 subunit (p35), a first masking moiety, a second masking moiety, an Fc domain, and 2-6 copies of CD40L ectodomains. FIGS. 6A and 6B show the IL-12 subunits and the masking moiety fused to the C-termini the Fc domain polypeptide chains; and the CD40L ectodomains and the antigen-binding moiety are fused to the N-termini of the Fc domain. FIGS. 6C and 6D show the IL-12 subunits and the masking moiety fused to the N-termini the Fc domain polypeptide chains; and the CD40L ectodomains and the antigen-binding moiety are fused to the C-termini of the Fc domain.

[0084] FIG. 7A shows the results of the NK92 interferon gamma releasing assay. The samples include chimeric molecules IL12p35-y40A, IL12p35-F166K, IL12p40-deletion, IL-12p40-AA, IL-12p35-N71Q and IL-12p35-T43A/S44G which comprise mutation or mutations in the IL-12 cytokine moiety. Chimeric molecule “IL-12 wt U mask” comprises the wild type IL-12. All those chimeric molecules are IL-12 prodrugs. The protease activated versions of the prodrugs were also included in the assay. The chimeric molecules after activation are named IL12p35-y40A act, IL12p35-F166K act, IL12p40-deletion act, IL-12p40-AA act, IL-12p35-N71Q act, IL-12p35-T43A/S44G act, and IL-12 wt U mask act, respectively.

[0085] FIG. 7B shows the amino acid sequences of the samples.

[0086] FIG. 8 illustrates the structure of a chimeric molecule which comprises a single domain antibody against LAG-3, which further comprises an Fc domain, an IL-12 p40 subunit polypeptide, an IL-12 p35 subunit polypeptide, and a masking moiety. Briefly, the single domain antibody is fused to the N-terminus of each of the Fc polypeptide through a non-cleavable peptide linker, said masking moiety is fused to the C-terminus of one of the Fc polypeptide chains, and said p40 subunit is fused to the C-terminus of the other Fc polypeptide chain; wherein said p35 is fused to the C-terminus of the p40 subunit. In an embodiment, said chimeric molecule does not comprise any cleavable peptide linker.

[0087] FIG. 9A illustrates the structure of a chimeric molecule which comprises an scFv against PD-1, which further comprises an Fc domain, an IL-12 p40 subunit polypeptide, an IL-12 p35 subunit polypeptide, and a masking moiety. Briefly, the scFv is fused to the N-terminus of each of the Fc polypeptide through a non-cleavable peptide linker, said masking moiety is fused to the C-terminus of one of the Fc polypeptide chains, and said p40 subunit is fused to the C-terminus of the other Fc polypeptide chain; wherein said p35 is fused to the C-terminus of the p40 subunit. In another embodiment, said chimeric molecule does not comprise any cleavable peptide linker.

[0088] FIG. 9B illustrates the structure of a chimeric molecule which comprises an antibody against PD-1, which further comprises an IL-12 p40 subunit polypeptide, an IL-12 p35 subunit polypeptide, and a masking moiety. Briefly, said masking moiety is fused to the C-terminus of one of the heavy chain polypeptide chains, and said p40 subunit is fused to the C-terminus of the other heavy chain polypeptide chain; wherein said p35 is fused to the C-terminus of the p40 subunit. In another embodiment, said chimeric molecule does not comprise any cleavable peptide linker.

[0089] FIG. 10A shows the results of the interferon gamma (IFNγ) releasing assay with chimeric molecules which comprise Fc domain as the carrier.

[0090] FIG. 10B shows the descriptions of the samples and the corresponding EC50 values. The samples comprise masking moieties derived from anti-IL-12 antibodies briakinumab (Bmask) or ustekinumab (Umask). The cytokine moiety comprises wild type IL-12 or a mutant IL-12 polypeptide selected from p35-Y40A and p35-F166A. The results showed that both Bmask and Umask inhibited the activities of IL-12. In addition, p35-Y40A mutation further reduced the activity of the chimeric molecule.

[0091] FIG. 11 shows the results of the HEK Blue-IL12 assay for the purified chimeric molecules ASKG129A, ASKG129B and ASKG129C. The data showed that all three molecules had significantly reduced biological activities as compared with IL-12. EC50 values of the molecules were over 200 times to 5000 times larger than IL-12. Notably, the masking moiety and the p35-Y40A mutation together significantly reduced the activities of IL-12.

[0092] FIG. 12 shows the cytokine releasing assay with human PBMC. The activity of ASKG129C was reduced by approximately 1000 times compared to that of IL-12.

[0093] FIGS. 13A-13G show the results of the ex vivo pSTAT4 analysis. Human recombinant IL-12 induced dose-dependent phosphorylation of STAT4 (p-STAT4) in human PBMC (EC50 values CD4⁺ T cells: 0.072 nM, CD8⁺ T cells: 0.045 nM, NK cells: 0.1662 nM), compared with Lag3-129C (or ASKG129C) (EC50 values CD4⁺ T cells: 2.52 nM, CD8⁺ T cells: 2.09 nM, NK cells: 3.75 nM). The E-max (Maximal response) for human IL-12-induced CD8⁺ T cells and NK cells was around 60 to 80% p-STAT4 positive cells vs 40 to 50% p-STAT4 positive CD4⁺ T cells. However, the Lag3-129C (or ASKG129C)-induced Emax response was much reduced in CD8⁺ T cells, NK cells, and CD4⁺ T cells (30%, 20%, and 10%) respectively. The activity of Lag3-129C to induce activation of STAT4 was significantly reduced compared with human recombinant IL-12 in CD4⁺ T cells, CD8⁺ T cells and NK cells.

[0094] FIG. 14 shows the purity analysis of the chimeric molecules by reduced and non-reduced SDS-PAGE. The amino acid sequence information of the molecules is shown in Table 8.

[0095] FIG. 15 shows the HEK-Blue IL-12 Assay results for the chimeric molecule SR2.7.4 which comprises an anti-PD-1 antibody and an IL-12 mutant, wherein said mutant comprises p40-K260A/R261A mutations. The activity of said chimeric molecule was lower compared to the Fc-based IL-12 chimeric molecule LL25-18, which comprises the wild type IL-12 and is masked by the U mask. In addition, both molecules had lower activity compared to the reference molecule, which is an IL-12 mutant molecule fused to the Fc domain, which was disclosed in United States Patent Application 20200216509.

[0096] FIGS. 16A, 16B and 16C show the SEC-HPLC chromatographs for purified ASKG129A (Lot #LL25-55), ASKG12B (Lot #LL25-58E2), and ASKG12C (Lot #LL25-52). All the purified samples had SEC-HPLC main peak purities of approximately 95% or higher.

### DETAILED DESCRIPTION OF THE INVENTION

[0097] As used herein and in the appended claims, the singular forms “a,” “or,” and “the” include plural referents unless the context clearly dictates otherwise. Reference to “about” a value or parameter herein includes (and describes) variations that are directed to that value or parameter per se. For example, description referring to “about X” includes description of “X.” Additionally, use of “about” preceding any series of numbers includes “about” each of the recited numbers in that series. For example, description referring to “about X, Y, or Z” is intended to describe “about X, about Y, or about Z.”

[0098] The term “antigen-binding moiety” refers to a polypeptide or a set of interacting polypeptides that specifically bind to an antigen, and includes, but is not limited to, an antibody (e.g., a monoclonal antibody, polyclonal antibody, a multi-specific antibody, a dual specific or bispecific antibody, an anti-idiotypic antibody, or a bifunctional hybrid antibody) or an antigen-binding fragment thereof (e.g., a Fab, a Fab′, a F(ab′)₂, a Fv, a disulfide linked Fv, a scFv, a single domain antibody (dAb), or a diabody), a single chain antibody, and an Fc-containing polypeptide such as an immunoadhesin. In some embodiments, the antibody may be of any heavy chain isotype (e.g., IgG, IgA, IgM, IgE, or IgD) or subtype (e.g., IgG₁, IgG₂, IgG₃, or IgG₄). In some embodiments, the antibody may be of any light chain isotype (e.g., kappa or lambda). The antibody may be human, non-human (e.g., from mouse, rat, rabbit, goat, or another non-human animal), chimeric (e.g., with a non-human variable region and a human constant region), or humanized (e.g., with non-human CDRs and human framework and constant regions). In some embodiments, the antibody is a derivatized antibody.

[0099] The terms “cytokine agonist polypeptide” or “cytokine moiety” refers to a wildtype cytokine, or an analog thereof. An analog of a wildtype cytokine has the same biological specificity (e.g., binding to the same receptor(s) and activating the same target cells) as the wildtype cytokine, although the activity level of the analog may be different from that of the wildtype cytokine. The analog may be, for example, a mutein (i.e., mutated polypeptide) of the wildtype cytokine, and may comprise at least one, at least two, at least three, at least four, at least five, at least six, at least seven, at least eight, at least nine, or at least ten mutations relative to the wildtype cytokine.

[0100] The term “cytokine mask” or “masking moiety” refers to a moiety (e.g., a polypeptide) that binds to a cytokine, thereby inhibiting the cytokine from binding to its receptor on the surface of a target cell and/or exerting its biological functions while being bound by the mask. Examples of a cytokine mask include, without limitations, a polypeptide derived from an extracellular domain of the cytokine's natural receptor that makes contact with the cytokine. Additional examples of a cytokine mask include, without limitations, an antibody or a binding fragment thereof or a single domain antibody which binds to the cytokine.

[0101] The term “effective amount” or “therapeutically effective amount” refers to an amount of a compound or composition sufficient to treat a specified disorder, condition, or disease, such as ameliorate, palliate, lessen, and/or delay one or more of its symptoms.

[0102] The term “functional analog” refers to a molecule that has the same biological specificity (e.g., binding to the same ligand) and/or activity (e.g., activating or inhibiting a target cell) as a reference molecule.

[0103] The term “fused” or “fusion” in reference to two polypeptide sequences refers to the joining of the two polypeptide sequences through a backbone peptide bond. Two polypeptides may be fused directly or through a peptide linker that is one or more amino acids long. A fusion polypeptide may be made by recombinant technology from a coding sequence containing the respective coding sequences for the two fusion partners, with or without a coding sequence for a peptide linker in between. In some embodiments, fusion encompasses chemical conjugation.

[0104] The term “pharmaceutically acceptable excipient” when used to refer to an ingredient in a composition means that the excipient is suitable for administration to a treatment subject, including a human subject, without undue deleterious side effects to the subject and without affecting the biological activity of the active pharmaceutical ingredient (API).

[0105] The term “subject” refers to an animal, including, but not limited to, a mammal and further includes, but is not limited to, a human, a pet (e.g., a canine or a feline), a farm animal (e.g., cattle or horse), a rodent, or a primate. Animals also include, but are not limited to, a chicken, a turkey, a donkey, an ostrich, a human, a monkey, a rat, a mouse, a goat, a sheep, a pig, an emu, or an alpaca.

[0106] As used herein, “treatment” or “treating” is an approach for obtaining beneficial or desired clinical results. Beneficial or desired clinical results include, but are not limited to, one or more of the following: alleviating one or more symptoms resulting from a disease, diminishing the extent of a disease, ameliorating a disease state, stabilizing a disease (e.g., preventing or delaying the worsening or progression of the disease), preventing or delaying the spread (e.g., metastasis) of a disease, preventing or delaying the recurrence of a disease, providing partial or total remission of a disease, decreasing the dose of one or more other medications required to treat a disease, increasing the patient's quality of life, and/or prolonging survival. The methods of the present disclosure contemplate any one or more of these aspects of treatment.

[0107] It is to be understood that one, some or all of the properties of the various embodiments described herein may be combined to form other embodiments of the present invention. The section headings used herein are for organizational purposes only and are not to be construed as limiting the subject matter described thereunder.

### I. Chimeric Molecules Comprising an IL-12 Agonist Polypeptide

[0108] Described herein are novel chimeric molecules which comprise an IL-12 agonist molecule. In some embodiments, a chimeric molecules are prodrugs, which are optionally activatable at the site of a tumor, even though it does not comprise any cleavable peptide linker.

[0109] The IL-12 chimeric molecules or prodrugs have fewer side effects, better in vivo PK profiles (e.g., longer half-life) and better target specificity, and are more efficacious as compared to prior IL-12 therapeutics. The present IL-12 chimeric molecules or prodrugs comprise an IL-12 agonist molecule, one or two masking moieties (M), a carrier (C), optionally 1-6 copies of the ectodomains of CD40L, OX40L, 4-1 BBL or GITRL, and optionally an antigen-binding moiety.

[0110] IL-12 comprises subunits p40 and p35. Subunit p40 comprises an amino acid as shown in SEQ ID NO: 5 and p35 comprises an amino acid sequence as shown in SEQ ID NO: 6. In some embodiments, said IL-12 analog comprises subunit p40 with an amino acid that is at least 90% identical to SEQ ID NO: 5. In some embodiments, said IL-12 analog comprises subunit p40 with an amino acid of SEQ ID NO: 46 or 63. In other embodiments, said IL-12 analog comprises subunit p35 with an amino acid sequence that is at least 90% identical to SEQ ID NO: 6.

[0111] In some embodiment, IL-12 subunit p40 comprises one or more mutation(s) or deletion(s) at a site or sites selected from Lys258, Ser259, Lys260, Arg261, Lys263, Lys264, and Asp265, and Arg266 (numbering according to SEQ ID NO: 5). In another embodiment, the IL-12 P40 subunit comprises mutations Lys260Ala and Arg261Ala (numbering according to SEQ ID NO: 5). In an embodiment, the IL-12 P40 subunit comprises an amino acid sequence of SEQ ID NO: 98 or at least 95% identical as that of SEQ ID NO: 98.

[0112] In some embodiment, said p35 subunit comprises one or more mutations selected from K128A, F166K, E38A, F39A, Y40A, T43A, S44G, E45A, E46A, D48A, H49A, E50A, E79A, T80A, F82A, and N71Q (numbering according to SEQ ID NO: 6).

[0113] In some embodiment, said p35 subunit comprises one or more mutations selected from K128A, F166K, E38A, F39A, Y40A, T43A, S44G, E45A, E46A, D48A, H49A, E50A, E79A, T80A, F82A, and N71Q (numbering according to SEQ ID NO: 6).

[0114] In some embodiments, said p35 subunit comprises a mutation or mutations selected from Y40A, T43A/S44G, N71Q, and F166K.

[0115] In another embodiment, said chimeric molecule comprises one or more polypeptide chains; wherein one of a polypeptide chains comprises an amino acid sequence selected from SEQ ID NOs: 82-96, and 99, or an amino acid sequence at least 90%, at least 95%, or at least 99% identical as one selected from SEQ ID NOs: 82-96, and 99.

[0116] In further embodiment, said chimeric molecule comprises an IL-12 p40 subunit (p40) and an IL-12 p35 subunit (p35); wherein said p35 comprises one or more mutations selected from K128A, F166K, E38A, F39A, Y40A, T43A, S44G, E45A, E46A, D48A, H49A, E50A, E79A, T80A, F82A, and N71Q (numbering according to SEQ ID NO: 6).

[0117] In an aspect, a chimeric molecule comprises an IL-12 p40 subunit (p40) and an IL-12 p35 subunit (p35); wherein said p35 comprises double mutations selected from E38A/F39A, T43A/S44G, E45A/E46A, D48A/H49A, and E79A/T80A (numbering according to SEQ ID NO: 6).

[0118] In a further embodiment, the IL-12 chimeric molecule/prodrugs comprise at least one masking moiety. The masking moieties may be linked to the cytokine moiety or to the carrier moiety through a peptide linker. In some embodiments, the peptide linker is a non-cleavable peptide linker. The mask inhibits the cytokine moiety's biological functions while the mask is binding to it. In specific embodiments, the mask inhibits a biological activity of IL-12 or its analog.

[0119] In some embodiments, the carriers for the IL-12 chimeric molecules or prodrugs are antigen-binding moieties that bind an antigen at a target site (e.g., tumor surface). In some embodiments, the present IL-12 chimeric molecules or prodrugs become active in the body at a target site targeted by the carrier. In further embodiments, the carrier in the prodrug is an antibody targeting a tumor antigen such that the IL-12 prodrug is delivered to a tumor site in a patient.

[0120] In some embodiments, the carrier is selected from an albumin, a Fc fragment, a polyethylene glycol (PEG), or an antibody or antigen-binding fragment thereof.

[0121] In some embodiments, the IL-12 chimeric molecules/prodrugs comprise an IL-12 agonist polypeptide, a first masking moiety (MM1), a second masking moiety (MM2), a carrier (C), and one or more non-cleavable peptide linkers that link the masking moieties to the agonist polypeptide or the carrier. In some embodiment, said IL-12 chimeric molecules/prodrugs comprise 2-6 copies of ectodomains of CD40L. In some embodiment, said IL-12 chimeric molecules/prodrugs comprise an antigen-binding moiety which binds to an antigen expressed on a tumor cell, a cancer cell or an immune cell. In some embodiment, an antigen binding moiety binds to Ig-Like Transcript 2 (ILT2), HLA-G, NKG2D, FAP, 5T4, PD-L1, PD-1, CD-47, or SIRPα. In some embodiment, said antigen-binding moiety comprises a scFv, a Fab or a binding fragment derived from the ILT2 antibody BDN-22.

### A. Masking Moieties of the IL-12 Chimeric Molecules or Prodrugs

[0122] In some embodiments, the carrier is selected from an albumin, a Fc fragment, a polyethylene glycol (PEG), or an antibody or antigen-binding fragment thereof.

[0123] In some embodiments, the masking moiety for IL-12 is selected from an IL-12 receptor beta1 subunit extracellular domain or a fragment thereof, an IL-12 receptor beta2 subunit extracellular domain or a fragment thereof, and a scFv or Fab with specificity to p40 or p35. In some embodiments, the masking moiety inhibits a biological activity of IL-12 or its analog. In some embodiments, the masking moiety comprises a scFv, wherein the scFv has an amino acid sequence at least 90%, at least 95%, or at least 99% identical to one selected from SEQ ID NOs: 1-4.

[0124] In some embodiment, a chimeric molecule comprises Mask A and Mask B; a Mask A comprises a scFv with an amino acid sequence of SEQ ID NO: 1 or 2 or at least 95% identical as that of SEQ ID NO: 1 or 2; and a Mask B comprises a scFv with an amino acid sequence of SEQ ID NO: 3 or 4 or at least 95% identical as that of SEQ ID NO: 3 or 4; and wherein a chimeric molecule comprises a structure as illustrated in FIG. 2A, 2B, 2C, 2D, 4A, 4B, 4C, 4D, 6A, 6B, 6C, or 6D. In some embodiments, the masking moiety is an IL-12 receptor extracellular domain (ECD) or its functional analog, wherein the IL-12 receptor is IL-12 receptor beta1. In some embodiments, the masking moiety is IL-12 receptor extracellular domain (ECD), its functional analog, or a fragment thereof, wherein the IL-12 receptor is IL-12 receptor beta1. In some embodiments, the prodrug comprises two masking moieties Mask A and Mask B; wherein at least one of the masking moieties comprises a scFv or Fab, which binds to p40 or p35, and reduces or inhibits the binding of IL-12 to IL-12Rβ1 or IL-12Rβ2. In some embodiments, the scFv or Fab comprises the same light chain CDRs and heavy chain CDRs as IL-12. In some embodiment, a Mask A comprises a scFv derived from ustekinumab and a MaskB comprises a scFv derived from briakinumab; and wherein a chimeric molecule comprises a structure as illustrated in FIG. 2A, 2B, 2C, 2D, 4A, 4B, 4C, 4D, 6A, 6B, 6C, or 6D. In some embodiments, the scFv or Fab comprises the same light chain CDRs and heavy chain CDRs as an IL-12 antibody selected from PMA204, Antibody 1, Antibody 50, Antibody 68, Antibody 80, and Antibody 136 (see U.S. Pat. No. 8,563,697).

[0125] In some embodiments, both masking moieties (Mask A and Mask B) are scFvs or Fabs; wherein the first masking moiety binds to p40 and reduces or inhibits the binding of IL-12 to IL-12Rβ1, and the second masking moiety binds to p40 or p35, and reduces or inhibits the binding of IL-12 to IL-12Rβ2. In some embodiments, the first masking moiety comprises the same light chain CDRs and heavy chain CDRs as an IL-12 antibody briakinumab or ustekinumab. In some embodiments, the second masking moiety comprises the same light chain CDRs and heavy chain CDRs as an IL-12 antibody selected from PMA204, Antibody 1, Antibody 50, Antibody 68, Antibody 80, and Antibody 136 (see U.S. Pat. No. 8,563,697).

[0126] In some embodiment, an IL-12 chimeric molecules are as illustrated in FIGS. 2A, 2B, 2C, 2D, 4A, 4B, 4C, 4D, 6A, 6B, 6C, and 6D. In some embodiment, a Mask A illustrated in the figures is a scFv comprises an amino acid sequence of SEQ ID NO: 1 or 2; wherein a Mask B illustrated in the figures is a scFv comprises an amino acid sequence of SEQ ID NO: 3 or 4.

### B. Carrier Moieties of the Chimeric Molecules or Prodrugs

[0127] The carrier moieties of the present chimeric molecules or prodrugs may be an antigen-binding moiety, or a moiety that is not antigen-binding. The carrier moiety may improve the PK profiles, such as serum half-life, of the cytokine agonist polypeptide and may also target the cytokine agonist polypeptide to a target site in the body, such as a tumor site.

### 1. Non-Antigen-Binding Carrier Moieties

[0128] Non-antigen-binding carrier moieties may be used for the present chimeric molecules or prodrugs. For example, an antibody Fc domain (e.g., a human IgG₁, IgG₂, IgG₃, or IgG₄ Fc), a polymer (e.g., PEG), an albumin (e.g., a human albumin) or a fragment thereof, or a nanoparticle can be used.

[0129] The carrier moiety of the prodrug may comprise an albumin (e.g., human serum albumin) or a fragment thereof. In some embodiments, the albumin or albumin fragment is about 85% or more, about 90% or more, about 91% or more, about 92% or more, about 93% or more, about 94% or more, about 95% or more, about 96% or more, about 97% or more, about 98% or more, about 99% or more, about 99.5% or more, or about 99.8% or more identical to human serum albumin or a fragment thereof.

[0130] In some embodiments, the carrier moiety comprises an albumin fragment (e.g., a human serum albumin fragment) that is about 10 or more, 20 or more, 30 or more 40 or more, 50 or more, 60 or more, 70 or more, 80 or more, 90 or more, 100 or more, 120 or more, 140 or more, 160 or more, 180 or more, 200 or more, 250 or more, 300 or more, 350 or more, 400 or more, 450 or more, 500 or more, or 550 or more amino acids in length. In some embodiments, the albumin fragment is between about 10 amino acids and about 584 amino acids in length (such as between about 10 and about 20, about 20 and about 40, about 40 and about 80, about 80 and about 160, about 160 and about 250, about 250 and about 350, about 350 and about 450, or about 450 and about 550 amino acids in length). In some embodiments, the albumin fragment includes the Sudlow I domain or a fragment thereof, or the Sudlow II domain or the fragment.

[0131] In some embodiments, the carrier is an antibody Fc fragment. Fc is a dimeric molecule that has two N-terminals and two C-terminals. In some embodiments, the cytokine moiety can be fused to one Fc polypeptide in a dimeric Fc fragment, and the masking moieties can be fused to the 2^{nd} Fc polypeptide. In another embodiment, both the cytokine moiety and the masking moiety are fused to the C-terminal of each polypeptide chain of the dimeric Fc fragment. In some embodiments, both the cytokine moiety and the masking moieties are fused to the N-terminal of each polypeptide chain of the dimeric Fc fragment. In either case, at least one of the masking moieties is fused to the Fc polypeptide directly or indirectly through a cleavable peptide linker.

### 2. Antigen-Binding Moieties

[0132] The antigen-binding moiety may be an antibody or an antigen-binding fragment thereof, or an immunoadhesin, or a ligand of a receptor. In some embodiments, the antigen-binding moiety is a full-length antibody with two heavy chains and two light chains, a Fab fragment, a Fab′ fragment, a F(ab′)₂ fragment, a Fv fragment, a disulfide linked Fv fragment, a single domain antibody, a nanobody, or a single-chain variable fragment (scFv). In some embodiments, the antigen-binding moiety is a bispecific antigen-binding moiety and can bind to two different antigens or two different epitopes on the same antigen. The antigen-binding moiety may provide additional and potentially synergetic therapeutic efficacy to the cytokine agonist polypeptide. In some embodiments, the antigen-binding moiety comprises a full-length antibody heavy chain or a full-length antibody light chain. In some embodiments, the antigen-binding moiety includes an antibody heavy chain fragment or an antibody light chain fragment.

[0133] In some embodiments, the cytokine moiety is fused to the C-terminus of one of the heavy chains of an antibody, and the cytokine's mask is fused to the C-terminus of the other heavy chain of the antibody through a peptide linker, wherein the two heavy chains optionally contain mutations that allow the specific pairing of the two different heavy chains.

[0134] Strategies of forming heterodimers for Fc-fusion polypeptides or bispecific antibodies are well known (see, e.g., Spies et al., Mol Imm. (2015) 67(2)(A):95-106). For example, the two heavy chain polypeptides in the prodrug may form stable heterodimers through “knobs-into-holes” mutations. “Knobs-into-holes” mutations are made to promote the formation of the heterodimers of the antibody heavy chains and are commonly used to make bispecific antibodies (see, e.g., U.S. Pat. No. 8,642,745). For example, the Fc domain of the antibody may comprise a T366W mutation in the CH3 domain of the “knob chain” and T366S, L368A, and/or Y407V mutations in the CH3 domain of the “hole chain.” An additional interchain disulfide bridge between the CH3 domains can also be used, e.g., by introducing a Y349C mutation into the CH3 domain of the “knobs chain” and an E356C or S354C mutation into the CH3 domain of the “hole chain” (see, e.g., Merchant et al., Nature Biotech. (1998) 16:677-81). In other embodiments, the antibody moiety may comprise Y349C and/or T366W mutations in one of the two CH3 domains, and E356C, T366S, L368A, and/or Y407V mutations in the other CH3 domain. In certain embodiments, the antibody moiety may comprise Y349C and/or T366W mutations in one of the two CH3 domains, and S354C (or E356C), T366S, L368A, and/or Y407V mutations in the other CH3 domain, with the additional Y349C mutation in one CH3 domain and the additional E356C or S354C mutation in the other CH3 domain, forming an interchain disulfide bridge (numbering always according to EU index of Kabat; Kabat et al., “Sequences of Proteins of Immunological Interest,” 5th ed., Public Health Service, National Institutes of Health, Bethesda, Md. (1991)). Other knobs-into-holes technologies, such as those described in EP1870459A1, can be used alternatively or additionally. Thus, another example of knobs-into-holes mutations for an antibody moiety is having R409D/K370E mutations in the CH3 domain of the “knob chain” and D399K/E357K mutations in the CH3 domain of the “hole chain” (EU numbering).

[0135] In some embodiments, the antibody moiety in the prodrug comprises L234A and L235A (“LALA”) mutations in its Fc domain. The LALA mutations eliminate complement binding and fixation as well as Fcγ dependent ADCC (see, e.g., Hezareh et al. J. Virol. (2001) 75(24):12161-8). In further embodiments, the LALA mutations are present in the antibody moiety in addition to the knobs-into-holes mutations.

[0136] In some embodiments, the antibody moiety comprises the M252Y/S254T/T256E (“YTE”) mutations in the Fc domain. The YTE mutations allow the simultaneous modulation of serum half-life, tissue distribution and activity of IgG, (see Dall'Acqua et al., J Biol Chem. (2006) 281: 23514-24; and Robbie et al., Antimicrob Agents Chemother. (2013) 57(12):6147-53). In further embodiments, the YTE mutations are present in the antibody moiety in addition to the knobs-into-holes mutations. In particular embodiments, the antibody moiety has YTE, LALA and knobs-into-holes mutations or any combination thereof.

[0137] In some embodiments, the antibody binds to PD-L1. In some embodiment, the antibody binds to CEA. In some embodiment, the antibody binds to an antigen on a tumor cell, for examples, 5T4, FAP, Trop-2, PD-L1, HER-2, EGFR, Claudin 18.2, DLL-3, GCP3, and CEA. The antibody may or may not have Antibody-Dependent Cellular Cytotoxicity (ADCC) activity. The antibody may also be further conjugated with cytotoxic drugs. In some embodiment, the antibody binds to a target on the surface of an immune cell and has the ability to activate a immune cell and enhance its anti-cancer activity, for examples, ILT-2 antibody, PD-1 antibody, LAG3 antibody, TIGIT antibody, TGF-beta antibody, and CTLA4 antibody.

[0138] The antigen-binding moiety can bind an antigen on the surface of a cell, such as a cancer cell. In some embodiments, the antigen-binding moiety is a bispecific antigen-binging moiety, can bind to two different antigens or two different epitopes on the same antigen. In some embodiments, the antigen-binding moiety binds to Guanyl cyclase C (GCC), carbohydrate antigen 19-9 (CA19-9), glycoprotein A33 (gpA33), mucin 1 (MUC1), carcinoembryonic antigen (CEA), insulin-like growth factor 1 receptor (IGF1-R), human epidermal growth factor receptor2 (HER2), human epidermal growth factor receptor 3 (HER3), delta-like protein 3 (DLL3), delta-like protein 4 (DLL4), epidermal growth factor receptor (EGFR), glypican-3 (GPC3), c-MET, vascular endothelial growth factor receptor 1 (VEGFR1) 1, vascular endothelial growth factor receptor 2 (VEGFR2), Nectin-4, Liv-1, glycoprotein NMB (GPNMB), prostate-specific membrane antigen (PSMA), Trop-2, carbonic anhydrase IX (CA9), endothelin B receptor (ETBR), Thomsen-Friedenrech antigen (TF), sodium-dependent phosphate transport protein 2B (NaPi2b), six transmembrane epithelial antigen of the prostate 1 (STEAP1), folate receptor alpha (FR-α), SLIT and NTRK-like protein 6 (SLITRK6), carbonic anhydrase VI (CA6), ectonucleotide pyrophosphatase/phosphodiesterase family member 3 (ENPP3), mesothelin, trophoblast glycoprotein (TPBG), CD19, CD20, CD22, CD33, CD40, CD56, CD66e, CD70, CD74, CD79b, CD98, CD123, CD138, CD352, programmed death ligand 1 (PD-L1), Claudin 18.2, Claudin 6, PSMA, or FAP-alpha. In some embodiments, the antigen-binding moiety binds to an epidermal growth factor (EGF)-like domain of DLL3. In some embodiments, the antigen-binding moiety binds to a Delta/Serrate/Lag2 (DSL)-like domain of DLL3. In some embodiments, the antigen-binding moiety binds to an epitope located after the 374^{th} amino acid of GPC3. In some embodiments, the antigen-binding moiety binds to a heparin sulfate glycan of GPC3. In some embodiments, the antigen-binding moiety binds to Claudin 18.2 and does not bind to Claudin 18.1. In some embodiments, the antigen-binding moiety binds to Claudin 18.1 with at least 10 times weaker binding affinity than to Claudin 18.2.

[0139] The antigen-binding moiety can bind an antigen on the surface of a cell, such as an immune cell, for example T cells, NK cells, and macrophages. In some embodiments, the antigen-binding moiety is a bispecific antigen-binging moiety, can bind to two different antigens or two different epitopes on the same antigen. In some embodiments, the antigen-binding moiety binds to ILT2, PD-1, LAG-3, TIM-3, CTLA-4, or TGF-beta.

[0140] In some embodiments, the antigen-binding moiety (carrier moiety) includes an antibody or fragment thereof known in the art that binds to PD-1 and disrupts the interaction between the PD-1 and its ligand (PD-L1) to stimulate an anti-tumor immune response. In some embodiments, the antibody or antigen-binding portion thereof binds specifically to PD-1. For example, antibodies that target PD-1 and which can find use in the present invention include, but are not limited to, nivolumab (BMS-936558, Bristol-Myers Squibb), pembrolizumab (lambrolizumab, MK03475 or MK-3475, Merck), humanized anti-PD-1 antibody JS001 (ShangHai JunShi), monoclonal anti-PD-1 antibody TSR-042 (Tesaro, Inc.), pidilizumab (anti-PD-1 mAb CT-011, Medivation), anti-PD-1 monoclonal Antibody BGB-A317 (BeiGene), and/or anti-PD-1 antibody SHR-1210 (ShangHai HengRui), human monoclonal antibody REGN2810 (Regeneron), human monoclonal antibody MDX-1106 (Bristol-Myers Squibb), and/or humanized anti-PD-1 IgG4 antibody PDR001 (Novartis). In some embodiments, the PD-1 antibody is from clone: RMP1-14 (rat IgG)-BioXcell cat #BP0146. Other suitable anti-PD-1 antibodies include those disclosed in U.S. Pat. No. 8,008,449. In some embodiments, the antibody or antigen-binding portion thereof binds specifically to PD-L1 and inhibits its interaction with PD-1, thereby increasing immune activity. Any antibodies known in the art which bind to PD-L1 and disrupt the interaction between the PD-1 and PD-L1, and stimulates an anti-tumor immune response, are suitable for use in combination treatment methods disclosed herein. As an example, antibodies that target PD-L1 include BMS-936559 (Bristol-Myers Squibb) and MPDL3280A (Genetech; currently in human trials). Other suitable antibodies that target PD-L1 are disclosed in U.S. Pat. No. 7,943,743. It will be understood by one of ordinary skill that any antibody which binds to PD-1 or PD-L1, disrupts the PD-1/PD-L1 interaction, and stimulates an anti-tumor immune response, is suitable for use in the combination treatment methods disclosed herein.

[0141] In some embodiments, wherein the carrier is an antibody against human PD-L1 is selected from ASKB1296, avelumab, atezolizumab and durvalumab.

[0142] Exemplary antigen-binding moieties include trastuzumab, rituximab, brentuximab, cetuximab, panitumumab, GC33 (or a humanized version thereof), anti-EGFR antibody mAb806 (or a humanized version thereof), anti-FAP-alpha antibody sibrotuzumab (BIBH1), and fragments thereof. In some embodiments, the antigen-binding moiety that has at least 90%, 91%, 92%, 93%, 94%, 95%, 96%, 97%, 98%, or 99% identity to trastuzumab, rituximab, brentuximab, cetuximab, or panitumumab, GC33 (or a humanized version thereof), anti-EGFR antibody mAb806 (or a humanized version thereof), sibrotuzumab (BIBH1), or a fragment thereof. In some embodiments, the antigen-binding moiety has an antibody heavy chain with at least 90%, 91%, 92%, 93%, 94%, 95%, 96%, 97%, 98%, or 99% identity to the antibody heavy chain of trastuzumab, rituximab, brentuximab, cetuximab, panitumumab, GC33 (or a humanized version thereof), anti-EGFR antibody mAb806 (or a humanized version thereof), sibrotuzumab (BIBH1), or a fragment thereof. In some embodiments, the antigen-binding moiety has an antibody light chain with at least 90%, 91%, 92%, 93%, 94%, 95%, 96%, 97%, 98%, or 99% identity to the antibody light chain of trastuzumab, rituximab, brentuximab, cetuximab, panitumumab, GC33 (or a humanized version thereof), anti-EGFR antibody mAb806 (or a humanized version thereof), sibrotuzumab (BIBH1), or a fragment thereof.

[0143] In some embodiments, the antigen-binding moiety comprises the six complementarity determining regions (CDRs) of trastuzumab, rituximab, brentuximab, cetuximab, panitumumab, GC33, anti-EGFR antibody mAb806, or sibrotuzumab (BIBH1). A number of CDR delineations are known in the art and are encompassed herein. A person of skill in the art can readily determine a CDR for a given delineation based on the sequence of the heavy or light chain variable region. The “Kabat” Complementarity Determining Regions (CDRs) are based on sequence variability and are the most commonly used (Kabat et al., Sequences of Proteins of Immunological Interest, 5th Ed. Public Health Service, National Institutes of Health, Bethesda, Md. (1991)). “Chothia” CDRs refer to the location of the structural loops (Chothia & Lesk, J. Mol. Biol. (1987) 196:901-917). The “AbM” CDRs represent a compromise between the Kabat CDRs and Chothia structural loops, and are used by Oxford Molecular's AbM antibody modeling software. The “Contact” CDRs are based on an analysis of the available complex crystal structures. The residues from each of these CDRs are noted below in Table 1, in reference to common antibody numbering schemes. Unless otherwise specified herein, amino acid number of antibodies refers to the Kabat numbering scheme as described in Kabat et al., supra, including when CDR delineations are made in reference to Kabat, Chothia, AbM, or Contact schemes. Using this numbering system, the actual linear amino acid sequence may contain fewer or additional amino acids corresponding to a shortening of, or insertion into, a framework region (FR) or CDR of the variable domain. For example, a heavy-chain variable domain may include a single amino acid insert (residue 52a according to Kabat) after residue 52 of H2 and inserted residues (e.g. residues 82a, 82b, and 82c, etc. according to Kabat) after heavy-chain FR residue 82. The Kabat numbering of residues may be determined for a given antibody by alignment at regions of homology of the sequence of the antibody with a “standard” Kabat numbered sequence.

TABLE 1
CDR Delineations According to Various Schemes

| CDR | Kabat | AbM | Chothia | Contact |
|---|---|---|---|---|
| VL-CDR1 | L24-L34 | L24-L34 | L26-L32 | L30-L36 |
| VL-CDR2 | L50-L56 | L50-L56 | L50-L52 | L46-L55 |
| VL-CDR3 | L89-L97 | L89-L97 | L91-L96 | L89-L96 |
| VH-CDR1 | H31-H35B | H26-H35B | H26-H32 | H30-H35B |
| (Kabat Numbering) | | | | |
| VH-CDR1 | H31-H35 | H26-H35 | H26-H32 | H30-H35 |
| (Chothia Numbering) | | | | |
| VH-CDR2 | H50-H65 | H50-H58 | H53-H55 | H47-H58 |
| VH-CDR3 | H95-H102 | H95-H102 | H95-H101 | H93-H101 |

[0144] In some embodiments, the CDRs are “extended CDRs,” and encompass a region that begins or terminates according to a different scheme. For example, an extended CDR can be as follows: L24-L36, L26-L34, or L26-L36 (VL-CDR1); L46-L52, L46-L56, or L50-L55 (VL-CDR2); L91-L97 (VL-CDR3); H47-H55, H47-H65, H50-H55, H53-H58, or H53-H65 (VH-CDR2); and/or H93-H102 (VH-CDR3).

[0145] In some embodiments, the IL-12 chimeric molecule or prodrug of the present disclosure comprises a carrier comprising an antigen-binding moiety; wherein the antigen-binding moiety binds to Trop-2. In some embodiments, the IL-12 prodrug is used to treat patients with solid tumors. In some embodiments, the prodrug is used to treat triple negative breath cancer, urothelial cancer, small-cell lung cancer, pancreatic cancer, hilar cholangiocarcinoma, cervical cancer, and gastric cancer.

[0146] In some embodiment, the IL-12 chimeric molecule or prodrug comprises a carrier comprising an antigen-binding moiety; wherein the antigen-binding moiety binds to 5T4. In some embodiments, the IL-12 prodrug is used to treat patients with solid tumor. In some embodiments, the prodrug is used to treat triple negative breath cancer, small-cell lung cancer, non-small cell lung cancer, pancreatic cancer, ovarian cancer, and gastric cancer.

[0147] In some embodiments, the IL-12 prodrug comprises a carrier comprising an antigen-binding moiety; wherein an antigen-binding moiety binds to Claudin 18.2. In some embodiments, the IL-12 prodrug is used to treat patients with pancreatic cancer and gastric cancer.

[0148] In some embodiments, an IL-12 chimeric molecule or prodrug comprises a carrier comprising an antigen-binding moiety; wherein a antigen-binding moiety binds to EGFR Type Ill. In some embodiment, an IL-12 prodrug is/are used to treat patients with glioblastoma and colon cancer.

[0149] In some embodiment, an IL-12 chimeric molecule/prodrugs is/are used in combination with an immune checkpoint blockade, such as a PD-1 antibody or an PD-1 antibody fragment thereof.

### C. Linker Components of the Chimeric Molecules or Prodrugs

[0150] The IL-12 agonist polypeptide is fused to the carrier moiety through a cleavable peptide linker, a non-cleavable peptide linker, or without a peptide linker. The masking moiety is fused to the cytokine moiety, to the carrier, or to another mask through a cleavable or non-cleavable linker, or without a peptide linker.

[0151] The non-cleavable peptide linker comprises an amino acid sequence selected from GSEPKSS, GGGGS, GGGGSGGGGS, GGGGSGGGGSGGGGS, or GGGGSGGGGSAAGGGGSGGGGS. In an embodiment, a p35 subunit is directly fused to the p40 subunit through a peptide linker, which comprises 5 to 10 amino acids. In an embodiment, a p35 subunit is directly fused to the p40 subunit through a peptide linker, which comprises GGGGS or GGGGSGGGGS.

[0152] The cleavable peptide linker comprises an amino acid sequence selected from SEQ ID NOs: 25-45. In an embodiment, a cleavable linker comprises an amino acid sequence of SEQ ID NO: 32.

[0153] In an embodiment, a chimeric molecule comprises a structure as illustrated in FIG. 1A, FIG. 1B, FIG. 8, FIG. 9A, or FIG. 9B. In an embodiment, a chimeric molecule comprise an IL-12 p40 subunit polypeptide, an IL-12 p35 subunit polypeptide, a masking moiety (MM), a carrier (C), and one or more cleavable and/or non-cleavable peptide linkers; wherein a carried comprises a first polypeptide chain, a second polypeptide chain, and optionally additional polypeptide chain; wherein a masking moiety is linked to the first polypeptide chain of the carrier optionally through a cleavable or non-cleavable peptide linker; wherein a p40 subunit polypeptide chain is directly fused to the second polypeptide chain of the carrier optionally through a cleavable or non-cleavable peptide linker; and wherein a p35 subunit polypeptide is directly fused to the p40 subunit polypeptide through a peptide linker. In an embodiment, a peptide linker comprises 5 to 10 amino acids. In an embodiment, peptide linker comprises GGGGS or GGGGSGGGGS.

D. IL-12 Chimeric Molecule/Prodrugs with an Additional Effector Polypeptide

### 1. CD40DL Agonist Polypeptides

[0154] In some embodiments, the IL-12 chimeric molecule or prodrug of the present disclosure further comprises another cytokine or effector moiety. In some embodiments, the second effector moiety comprises one or more copies of the ectodomain of 4-1 BBL, CD40L, OX40L, or GITRL. In some embodiment, a chimeric molecule or prodrug comprises 1, 2, 3, 4, or 6 copies of the ectodomain of CD40L. In some embodiment, a CD40L ectodomain comprises an amino acid sequence of SEQ ID NO: 7 or at least 80%, at least 85%, at least 90%, at least 95%, or at least 99% identical as that of SEQ ID NO: 7.

### 2. NKG2D Ligand Polypeptides

[0155] In some embodiments, the IL-12 chimeric molecule or prodrug of the present disclosure further comprises one or more copies of the ectodomain of a NKG2D ligand. In some embodiment, an NKG2D ligand comprises an amino acid sequence of SEQ ID NO: 68 or or at least 80%, at least 85%, at least 90%, at least 95%, or at least 99% identical as that of SEQ ID NO: 68.

### II. Examples of IL-12 Chimeric Molecules or Prodrugs

[0156] In some embodiments, the IL-12 chimeric molecules or prodrug comprises an antibody or an Fc domain, and an IL-12 agonist polypeptide; wherein the IL-12 agonist polypeptide is fused to the C-terminal of one of the heavy chains of the antibody or Fc polypeptide chain of the Fc domain, optionally through a peptide linker; wherein an IL-12 masking moiety is fused to the C-terminal of the 2^{nd} heavy chain or Fc polypeptide chain. Examples of the chimeric molecules or prodrugs are illustrated in FIGS. 1A, 1B, 1C, 1D, 2A, 2B, 2C, 2D, 3A, 3B, 3C, 3D, 4A, 4B, 4C, 4D, 5A, 5B, 5C, 5D, 6A, 6B, 6C, and 6D. All the chimeric molecules or prodrugs are shown with the cytokine components p35 and p40 and the masking moieties located on the C-termini of the Fc domains. In some embodiments, the cytokine components p35 and p40 and the masking moieties are located on the N-termini of the Fc domains.

[0157] By way of example, an IL-12 chimeric molecule comprises a first polypeptide chain and a second polypeptide chain; wherein a first polypeptide chain comprises an amino acid sequence of SEQ ID NO: 80 or at least 90% identical as that of SEQ ID NO: 80, and a second polypeptide chain comprises an amino acid sequence of SEQ ID NO: 81 or at least 90% identical as that of SEQ ID NO: 81.

[0158] By way of example, an IL-12 chimeric molecules or prodrugs of Group A comprises three polypeptide chains, wherein the first polypeptide chain comprises an amino acid sequence at least 99% identical to SEQ ID NO: 8, 47, or 49; the second polypeptide chain comprises an amino acid sequence at least 99% identical as on selected from SEQ ID NOs: 13-17, 57-59, and 60; and the third polypeptide chain comprises an amino acid sequence at least 90% identical as that of SEQ ID NO: 6. For each molecule in this group, the IL-12 cytokine moiety and the masking moiety are fused to the C-termini of the Fc domain.

[0159] By way of example, an IL-12 chimeric molecules or prodrugs of Group B comprises three polypeptide chains, wherein the first polypeptide chain comprises an amino acid sequence at least 99% identical to SEQ ID NO: 9, 48, or 50; the second polypeptide chain comprises an amino acid sequence at least 99% identical as on selected from SEQ ID NOs: 18-20, 61, and 62; and the third polypeptide chain comprises an amino acid sequence at least 90% identical as that of SEQ ID NO: 6. For each molecule in this group, the IL-12 cytokine moiety and the masking moiety are fused to the N-termini of the Fc domain.

[0160] By way of example, an IL-12 chimeric molecules or prodrugs of Group C comprises two polypeptide chains, wherein the first polypeptide chain comprises an amino acid sequence at least 99% identical to SEQ ID NO: 10, 11, 21, 23, 51, 52, 54, or 55; and the second polypeptide chain comprises an amino acid sequence at least 99% identical as on selected from SEQ ID NOs: 13-17, 57-59, and 60. For each molecule in this group, the IL-12 cytokine moiety and the masking moiety are fused to the C-termini of the Fc domain.

[0161] By way of example, an IL-12 chimeric molecules or prodrugs of Group D comprises two polypeptide chains, wherein the first polypeptide chain comprises an amino acid sequence at least 99% identical to SEQ ID NO: 12, 22, 24, 53, or 56; the second polypeptide chain comprises an amino acid sequence at least 99% identical as on selected from SEQ ID NOs: 18-20, 61, and 62. For each molecule in this group, the IL-12 cytokine moiety and the masking moiety are fused to the N-termini of the Fc domain.

TABLE 2
Exemplary Chimeric Molecules

| Molecule | | | Third chain if |
|---|---|---|---|
| Group | Cytokine Chain | Mask Chain | any |
| A | SEQ ID NO: 8-Fc-IL-12 | SEQ ID NO: 13 Fc-scFV which | SEQ ID NO: 6 |
| | P40 with knobs mutations | binds to IL-12-VL-VH | P35 subunit of IL- |
| | SEQ ID NO: 47-Fc-IL-12 | Ustekinumab-Briakinnumab | 12 |
| | P40 mutant with knobs | SEQ ID NO: 14 Fc-scFV which | |
| | mutations | binds to IL-12-VL-VH | |
| | SEQ ID NO: 49-Fc-IL-12 | Briakinnumab-Ustekinumab | |
| | mutant P40 with knobs | SEQ ID NO: 15 Fc-scFV which | |
| | mutations | binds to IL-12-VL-VH | |
| | | Briakinnumab-Ustekinumab | |
| | | with cleavable linker | |
| | | SEQ ID NO: 57 Fc-scFV which | |
| | | binds to IL-12-VL-VH | |
| | | Ustekinumab | |
| | | SEQ ID NO: 58 Fc-scFV which | |
| | | binds to IL-12-VL-VH | |
| | | Ustekinumab with cleavable | |
| | | linker | |
| | | SEQ ID NO: 16 CD40L-Fc- | |
| | | scFV which binds to IL-12-VL- | |
| | | VH Ustekinumab-Briakinnumab | |
| | | SEQ ID NO: 17 CD40L-Fc- | |
| | | scFV which binds to IL-12-VL- | |
| | | VH Briakinnumab-Ustekinumab | |
| | | with cleavable linker | |
| | | SEQ ID NO: 59 CD40L-Fc- | |
| | | scFV which binds to IL-12-VL- | |
| | | VH Ustekinumab | |
| | | SEQ ID NO: 60 CD40L-Fc- | |
| | | scFV which binds to IL-12-VL- | |
| | | VH Briakinnumab-Ustekinumab | |
| | | with cleavable linker | |
| B | SEQ ID NO: 9-IL-12 P40-Fc | SEQ ID NO: 18 scFV which | SEQ ID NO: 6 |
| | with knobs mutations | binds to IL-12-VL-VH | P35 subunit of IL- |
| | SEQ ID NO: 48-IL-12 P40 | Ustekinumab-Briakinnumab- | 12 |
| | mutant-Fc with knobs | Fc-CD40L | |
| | mutations | SEQ ID NO: 19 scFV which | |
| | SEQ ID NO: 50-IL-12 P40 | binds to IL-12-VL-VH | |
| | mutant-Fc with knobs | Ustekinumab-Briakinnumab- | |
| | mutations | Fc-CD40L, with a cleavable | |
| | | linker | |
| | | SEQ ID NO: 20 scFV which | |
| | | binds to IL-12-VL-VH | |
| | | Briakinnumab-Ustekinumab- | |
| | | Fc-CD40L | |
| | | SEQ ID NO: 61 scFV which | |
| | | binds to IL-12-VL-VH | |
| | | Ustekinumab-Fc-CD40L | |
| | | SEQ ID NO: 62 scFV which | |
| | | binds to IL-12-VL-VH | |
| | | Ustekinumab-Fc-CD40L, | |
| | | with a cleavable linker | |
| C | SEQ ID NO: 10-Fc-IL-12 | SEQ ID NO: 13 Fc-scFV which | |
| | (P40-P35) with knobs | binds to IL-12-VL-VH | |
| | mutations | Ustekinumab-Briakinnumab | |
| | SEQ ID NO: 51-Fc-IL-12 | SEQ ID NO: 14 Fc-scFV which | |
| | (P40-P35) mutant with knobs | binds to IL-12-VL-VH | |
| | mutations | Briakinnumab-Ustekinumab | |
| | SEQ ID NO: 54-Fc-IL-12 | SEQ ID NO: 15 Fc-scFV which | |
| | (P40-P35) mutant with knobs | binds to IL-12-VL-VH | |
| | mutations | Briakinnumab-Ustekinumab | |
| | SEQ ID NO: 11 CD40L-Fc- | with cleavable linker | |
| | IL-12 (P40-P35) with knobs | SEQ ID NO: 57 Fc-scFV which | |
| | mutations | binds to IL-12-VL-VH | |
| | SEQ ID NO: 21-SIRPα ECD- | Ustekinumab | |
| | Fc-IL-12 (P40-P35) with | SEQ ID NO: 58 Fc-scFV which | |
| | knobs mutations | binds to IL-12-VL-VH | |
| | SEQ ID NO: 23-CD47 ECD- | Ustekinumab with cleavable | |
| | Fc-IL-12 (P40-P35) with | linker | |
| | knobs mutations | SEQ ID NO: 16 CD40L-FC- | |
| | SEQ ID NO: 52 CD40L-Fc- | scFV which binds to IL-12-VL- | |
| | IL-12 (P40-P35) mutant with | VH Ustekinumab-Briakinnumab | |
| | knobs mutations | SEQ ID NO: 17 CD40L-Fc- | |
| | SEQ ID NO: 55 CD40L-Fc- | scFV which binds to IL-12-VL- | |
| | IL-12 (P40-P35) mutant with | VH Briakinnumab-Ustekinumab | |
| | knobs mutations | with cleavable linker | |
| | | SEQ ID NO: 59 CD40L-Fc- | |
| | | scFV which binds to IL-12-VL- | |
| | | VH Ustekinumab | |
| | | SEQ ID NO: 60 CD40L-Fc- | |
| | | scFV which binds to IL-12-VL- | |
| | | VH Briakinnumab-Ustekinumab | |
| | | with cleavable linker | |
| D | SEQ ID NO: 12 IL-12 (P40- | SEQ ID NO: 18 scFV which | |
| | P35)-Fc-CD40L with knobs | binds to IL-12-VL-VH | |
| | mutations | Ustekinumab-Briakinnumab- | |
| | SEQ ID NO: 22-IL-12 (P40- | Fc-CD40L | |
| | P35)-Fc-SIRPα ECD with | SEQ ID NO: 19 scFV which | |
| | knobs mutations | binds to IL-12-VL-VH | |
| | SEQ ID NO: 24-IL-12 (P40- | Ustekinumab-Briakinnumab- | |
| | P35)-Fc-CD47 ECD with | Fc-CD40L, with a cleavable | |
| | knobs mutations | linker | |
| | SEQ ID NO: 53 IL-12 (P40- | SEQ ID NO: 20 scFV which | |
| | P35) mutant-Fc-CD40L | binds to IL-12-VL-VH | |
| | with knobs mutations | Briakinnumab-Ustekinumab- | |
| | SEQ ID NO: 56 IL-12 (P40- | Fc-CD40L | |
| | P35) mutant-Fc-CD40L | SEQ ID NO: 61 scFV which | |
| | with knobs mutations | binds to IL-12-VL-VH | |
| | | Ustekinumab-Fc-CD40L | |
| | | SEQ ID NO: 62 scFV which | |
| | | binds to IL-12-VL-VH | |
| | | Ustekinumab-Fc-CD40L, | |
| | | with a cleavable linker | |

[0162] By way of example, an IL-12 chimeric molecule or prodrug comprises two polypeptide chains, wherein the first polypeptide chain comprises an amino acid sequence at least 99% identical to SEQ ID NO: 97; the second polypeptide chain comprises an amino acid sequence at least 99% identical as on selected from SEQ ID NOs: 84, 89, 90, 91, 93, and 96. For each molecule in this group, the IL-12 cytokine moiety and the masking moiety are fused to the C-termini of the Fc domain. In addition, each of the IL-12 cytokine moiety comprises one or more mutations in its p35 or p40 subunit, or a deletion of several amino acids in its p40 subunit.

TABLE 3
Exemplary Chimeric Molecules Comprising Mutant p40 Subunit or
Mutant p35 Subunit

| Sample Name | 1^{st} Polypeptide chain | 2^{nd} polypeptide chain |
|---|---|---|
| IL12p35-y40A | SEQ ID NO: 97 | SEQ ID NO: 84 |
| IL12p35-F166K | | SEQ ID NO: 90 |
| IL12p40-delection | | SEQ ID NO: 93 |
| IL-12p40-AA | | SEQ ID NO: 96 |
| IL-12p35-N71Q | | SEQ ID NO: 89 |
| IL-12p35-T43A/S44G | | SEQ ID NO: 91 |
| IL-12 wt U mask | | SEQ ID NO: 81 |

### III. Pharmaceutical Compositions

[0163] Pharmaceutical compositions of the prodrugs are prepared by mixing the presently disclosed prodrugs, or antibody fusion molecules or the antibody fusion molecule drug conjugate having the desired degree of purity with one or more optional pharmaceutically acceptable carriers (see Osol, A. Ed. Remington's Pharmaceutical Sciences 16th edition (1980)), in the form of lyophilized formulations or aqueous solutions. Pharmaceutically acceptable carriers are generally nontoxic to recipients at the dosages and concentrations employed, and include, but are not limited to: buffers such as phosphate, citrate, and other organic acids; antioxidants including ascorbic acid and methionine; preservatives (such as octadecyldimethylbenzyl ammonium chloride; hexamethonium chloride; benzalkonium chloride; benzethonium chloride; phenol, butyl or benzyl alcohol; alkyl parabens such as methyl or propyl paraben; catechol; resorcinol; cyclohexanol; 3-pentanol; and m-cresol); low molecular weight (less than about 10 residues) polypeptides; proteins, such as serum albumin, gelatin, or immunoglobulins; hydrophilic polymers such as polyvinylpyrrolidone; amino acids such as glycine, glutamine, asparagine, histidine, arginine, or lysine; monosaccharides, disaccharides, and other carbohydrates including glucose, mannose, or dextrins; chelating agents such as EDTA; sugars such as sucrose, mannitol, trehalose or sorbitol; salt-forming counter-ions such as sodium; metal complexes (e.g. Zn-protein complexes); and/or non-ionic surfactants such as polyethylene glycol (PEG).

[0164] Buffers are used to control the pH in a range which optimizes the therapeutic effectiveness, especially if stability is pH dependent. Buffers are preferably present at concentrations ranging from about 50 mM to about 250 mM. Suitable buffering agents for use with the present invention include both organic and inorganic acids and salts thereof, such as citrate, phosphate, succinate, tartrate, fumarate, gluconate, oxalate, lactate, acetate. Additionally, buffers may comprise histidine and trimethylamine salts such as Tris.

[0165] Preservatives are added to retard microbial growth, and are typically present in a range from 0.2%-1.0% (w/v). Suitable preservatives for use with the present invention include octadecyldimethylbenzyl ammonium chloride; hexamethonium chloride; benzalkonium halides (e.g., chloride, bromide, iodide), benzethonium chloride; thimerosal, phenol, butyl or benzyl alcohol; alkyl parabens such as methyl or propyl paraben; catechol; resorcinol; cyclohexanol, 3-pentanol, and m-cresol.

[0166] Tonicity agents, sometimes known as “stabilizers” are present to adjust or maintain the tonicity of liquid in a composition. When used with large, charged biomolecules such as proteins and antibodies, they are often termed “stabilizers” because they can interact with the charged groups of the amino acid side chains, thereby lessening the potential for inter- and intra-molecular interactions. Tonicity agents can be present in any amount between 0.1% to 25% by weight, or more preferably between 1% to 5% by weight, taking into account the relative amounts of the other ingredients. Preferred tonicity agents include polyhydric sugar alcohols, preferably trihydric or higher sugar alcohols, such as glycerin, erythritol, arabitol, xylitol, sorbitol and mannitol.

[0167] Non-ionic surfactants or detergents (also known as “wetting agents”) are present to help solubilize the therapeutic agent as well as to protect the therapeutic protein against agitation-induced aggregation, which also permits the formulation to be exposed to shear surface stress without causing denaturation of the active therapeutic protein or antibody. Non-ionic surfactants are present in a range of about 0.05 mg/ml to about 1.0 mg/ml, preferably about 0.07 mg/ml to about 0.2 mg/ml.

[0168] Suitable non-ionic surfactants include polysorbates (20, 40, 60, 65, 80, etc.), polyoxamers (184, 188, etc.), PLURONIC®polyols, TRITON®, polyoxyethylene sorbitan monoethers (TWEEN®-20, TWEEN®-80, etc.), lauromacrogol 400, polyoxyl 40 stearate, polyoxyethylene hydrogenated castor oil 10, 50 and 60, glycerol monostearate, sucrose fatty acid ester, methyl cellulose and carboxymethyl cellulose. Anionic detergents that can be used include sodium lauryl sulfate, dioctyle sodium sulfosuccinate and dioctyl sodium sulfonate. Cationic detergents include benzalkonium chloride or benzethonium chloride.

[0169] The choice of pharmaceutical carrier, excipient or diluent may be selected with regard to the intended route of administration and standard pharmaceutical practice. Pharmaceutical compositions may comprise as—or in addition to—the carrier, excipient or diluent any suitable binder(s), lubricant(s), suspending agent(s), coating agent(s) or solubilizing agent(s).

[0170] There may be different composition/formulation requirements dependent on the different delivery systems. By way of example, pharmaceutical compositions useful in the present invention may be formulated to be administered using a mini-pump or by a mucosal route, for example, as a nasal spray or aerosol for inhalation or ingestible solution, or parenterally in which the composition is formulated by an injectable form, for delivery, by, for example, an intravenous, intramuscular or subcutaneous route. Alternatively, the formulation may be designed to be administered by a number of routes. In some embodiment, a formulation is administrated directly in a tumor or tumors.

[0171] In some embodiments, an antibody or protein formulation is a lyophilized formulation. In another embodiment, an antibody or protein formulation is an aqueous formulation.

[0172] In some embodiments, the pharmaceutical composition is a combination pharmaceutical composition, which comprises an IL-12 chimeric molecule or prodrug of the present invention, a pharmaceutically acceptable excipient, and a second active ingredient selected from a cytokine other than IL-12 or its fusion molecule, an antibody against PD-1, an antibody against PD-L1, an antibody against CTLA-4, an antibody against CD47, a PD-1 antibody-IL-15 fusion molecule, a PD-1-IL-2 fusion molecule, and a PD-1-IL-21 fusion molecule.

[0173] In other aspects of this embodiment, a chimeric molecule disclosed herein reduces the size of a tumor by, e.g., at least 10%, at least 15%, at least 20%, at least 25%, at least 30%, at least 35%, at least 40%, at least 45%, at least 50%, at least 55%, at least 60%, at least 65%, at least 70%, at least 75%, at least 80%, at least 85%, at least 90% or at least 95%. In yet other aspects of this embodiment, a chimeric molecule disclosed herein reduces the size of a tumor from, e.g., about 5% to about 100%, about 10% to about 100%, about 20% to about 100%, about 30% to about 100%, about 40% to about 100%, about 50% to about 100%, about 60% to about 100%, about 70% to about 100%, about 80% to about 100%, about 10% to about 90%, about 20% to about 90%, about 30% to about 90%, about 40% to about 90%, about 50% to about 90%, about 60% to about 90%, about 70% to about 90%, about 10% to about 80%, about 20% to about 80%, about 30% to about 80%, about 40% to about 80%, about 50% to about 80%, or about 60% to about 80%, about 10% to about 70%, about 20% to about 70%, about 30% to about 70%, about 40% to about 70%, or about 50% to about 70%.

[0174] A pharmaceutical composition disclosed herein may comprise a therapeutic compound in an amount sufficient to allow customary administration to an individual. In aspects of this embodiment, a pharmaceutical composition disclosed herein may be, e.g., at least 5 μg, at least 10 μg, at least 15 μg, at least 20 μg, at least 25 μg, at least 30 μg, at least 35 μg, at least 40 μg, at least 45 μg, at least 50 μg, at least 55 μg, at least 60 μg, at least 65 μg, at least 70 μg, at least 75 μg, at least 80 μg, at least 85 μg, at least 90 μg, at least 95 μg, or at least 100 μg, at least 150 μg, at least 200 μg, at least 250 μg, at least 300 μg, at least 350 μg, at least 400 μg, at least 450 μg, at least 500 μg, at least 550 μg, at least 600 μg, at least 650 μg, at least 700 μg, at least 750 μg, at least 800 μg, at least 850 μg, at least 900 μg, at least 950 μg, at least 1000 μg, at least 1500 μg, at least 2000 μg, at least 25000 μg, at least 3000 μg, at least 3500 μg, at least 4000 μg, at least 4500, at least 5 mg, at least 10 mg, at least 15 mg, at least 20 mg, at least 25 mg, at least 30 mg, at least 35 mg, at least 40 mg, at least 45 mg, at least 50 mg, at least 55 mg, at least 60 mg, at least 65 mg, at least 70 mg, at least 75 mg, at least 80 mg, at least 85 mg, at least 90 mg, at least 95 mg, or at least 100 mg of a chimeric molecule.

[0175] In other aspects of this embodiment, a pharmaceutical composition disclosed herein may be, e.g., t least 5 μg, at least 10 μg, at least 15 μg, at least 20 μg, at least 25 μg, at least 30 μg, at least 35 μg, at least 40 μg, at least 45 μg, at least 50 μg, at least 55 μg, at least 60 μg, at least 65 μg, at least 70 μg, at least 75 μg, at least 80 μg, at least 85 μg, at least 90 μg, at least 95 μg, or at least 100 μg, at least 150 μg, at least 200 μg, at least 250 μg, at least 300 μg, at least 350 μg, at least 400 μg, at least 450 μg, at least 500 μg, at least 550 μg, at least 600 μg, at least 650 μg, at least 700 μg, at least 750 μg, at least 800 μg, at least 850 μg, at least 900 μg, at least 950 μg, at least 1000 μg, at least 1500 μg, at least 2000 μg, at least 25000 μg, at least 3000 μg, at least 3500 μg, at least 4000 μg, at least 4500, at least 5 mg, at least 10 mg, at least 20 mg, at least 25 mg, at least 50 mg, at least 75 mg, at least 100 mg, at least 200 mg, at least 300 mg, at least 400 mg, at least 500 mg, at least 600 mg, at least 700 mg, at least 800 mg, at least 900 mg, at least 1,000 mg, at least 1,100 mg, at least 1,200 mg, at least 1,300 mg, at least 1,400 mg, or at least 1,500 mg of a chimeric compound.

[0176] In yet other aspects of this embodiment, a pharmaceutical composition disclosed herein may be in the range of, e.g., about 5 μg to about 100 μg, about 10 μg to about 100 μg, about 50 μg to about 150 μg, about 100 μg to about 250 μg, about 150 μg to about 350 μg, about 250 μg to about 500 μg, about 350 μg to about 600 μg, about 500 μg to about 750 μg, about 600 μg to about 900 μg, about 750 μg to about 1,000 μg, about 850 μg to about 1,200 μg, or about 1,000 μg to about 1,500 μg.

[0177] In still other aspects of this embodiment, a pharmaceutical composition disclosed herein may be in the range of, e.g., about 10 μg to about 250 μg, about 10 μg to about 500 μg, about 10 μg to about 750 μg, about 10 μg to about 1,000 μg, about 10 μg to about 1,500 μg, about 50 μg to about 250 μg, about 50 μg to about 500 μg, about 50 μg to about 750 μg, about 50 μg to about 1,000 μg, about 50 μg to about 1,500 μg, about 100 μg to about 250 μg, about 100 μg to about 500 μg, about 100 μg to about 750 μg, about 100 μg to about 1,000 μg, about 100 μg to about 1,500 μg, about 200 μg to about 500 μg, about 200 μg to about 750 μg, about 200 μg to about 1,000 μg, about 200 μg to about 1,500 μg, about 5 mg to about 1,500 mg, about 5 mg to about 1,000 mg, or about 5 mg to about 250 mg, about 5 mg to about 100 mg, about 10 mg to about 100 mg, about 50 mg to about 150 mg, about 100 mg to about 250 mg, about 150 mg to about 350 mg, about 250 mg to about 500 mg, about 350 mg to about 600 mg, about 500 mg to about 750 mg, about 600 mg to about 900 mg, about 750 mg to about 1,000 mg, about 850 mg to about 1,200 mg, or about 1,000 mg to about 1,500 mg of a chimeric molecule.

[0178] A pharmaceutical composition disclosed herein may comprise a solvent, emulsion or other diluent in an amount sufficient to dissolve a therapeutic compound disclosed herein. In other aspects of this embodiment, a pharmaceutical composition disclosed herein may comprise a solvent, emulsion or a diluent in an amount of, e.g., less than about 90% (v/v), less than about 80% (v/v), less than about 70% (v/v), less than about 65% (v/v), less than about 60% (v/v), less than about 55% (v/v), less than about 50% (v/v), less than about 45% (v/v), less than about 40% (v/v), less than about 35% (v/v), less than about 30% (v/v), less than about 25% (v/v), less than about 20% (v/v), less than about 15% (v/v), less than about 10% (v/v), less than about 5% (v/v), or less than about 1% (v/v).

[0179] In other aspects of this embodiment, a pharmaceutical composition disclosed herein may comprise a solvent, emulsion or other diluent in an amount in a range of, e.g., about 1% (v/v) to 90% (v/v), about 1% (v/v) to 70% (v/v), about 1% (v/v) to 60% (v/v), about 1% (v/v) to 50% (v/v), about 1% (v/v) to 40% (v/v), about 1% (v/v) to 30% (v/v), about 1% (v/v) to 20% (v/v), about 1% (v/v) to 10% (v/v), about 2% (v/v) to 50% (v/v), about 2% (v/v) to 40% (v/v), about 2% (v/v) to 30% (v/v), about 2% (v/v) to 20% (v/v), about 2% (v/v) to 10% (v/v), about 4% (v/v) to 50% (v/v), about 4% (v/v) to 40% (v/v), about 4% (v/v) to 30% (v/v), about 4% (v/v) to 20% (v/v), about 4% (v/v) to 10% (v/v), about 6% (v/v) to 50% (v/v), about 6% (v/v) to 40% (v/v), about 6% (v/v) to 30% (v/v), about 6% (v/v) to 20% (v/v), about 6% (v/v) to 10% (v/v), about 8% (v/v) to 50% (v/v), about 8% (v/v) to 40% (v/v), about 8% (v/v) to 30% (v/v), about 8% (v/v) to 20% (v/v), about 8% (v/v) to 15% (v/v), or about 8% (v/v) to 12% (v/v).

[0180] The final concentration of a chimeric molecule disclosed herein in a pharmaceutical composition disclosed herein may be of any concentration desired. In an aspect of this embodiment, the final concentration of a chimeric molecule in a pharmaceutical composition may be a therapeutically effective amount.

[0181] In other aspects of this embodiment, the final concentration of a chimeric molecule in a pharmaceutical composition may be, e.g., at least 0.00001 mg/mL, at least 0.0001 mg/mL, at least 0.001 mg/mL, at least 0.01 mg/mL, at least 0.1 mg/mL, at least 1 mg/mL, at least 10 mg/mL, at least 25 mg/mL, at least 50 mg/mL, at least 100 mg/mL, at least 200 mg/mL, at least 500 mg/mL, at least 700 mg/mL, at least 1,000 mg/mL, or at least 1,200 mg/mL. In other aspects of this embodiment, the concentration of a therapeutic compound disclosed herein in the solution may be, e.g., at most 1,000 mg/mL, at most 1,100 mg/mL, at most 1,200 mg/mL, at most 1,300 mg/mL, at most 1,400 mg/mL, at most 1,500 mg/mL, at most 2,000 mg/mL, at most 2,000 mg/mL, or at most 3,000 mg/mL.

[0182] In other aspects of this embodiment, the final concentration of a chimeric molecule in a pharmaceutical composition may be in a range of, e.g., about 0.00001 mg/mL to about 3,000 mg/mL, about 0.0001 mg/mL to about 3,000 mg/mL, about 0.01 mg/mL to about 3,000 mg/mL, about 0.1 mg/mL to about 3,000 mg/mL, about 1 mg/mL to about 3,000 mg/mL, about 250 mg/mL to about 3,000 mg/mL, about 500 mg/mL to about 3,000 mg/mL, about 750 mg/mL to about 3,000 mg/mL, about 1,000 mg/mL to about 3,000 mg/mL, about 100 mg/mL to about 2,000 mg/mL, about 250 mg/mL to about 2,000 mg/mL, about 500 mg/mL to about 2,000 mg/mL, about 750 mg/mL to about 2,000 mg/mL, about 1,000 mg/mL to about 2,000 mg/mL, about 100 mg/mL to about 1,500 mg/mL, about 250 mg/mL to about 1,500 mg/mL, about 500 mg/mL to about 1,500 mg/mL, about 750 mg/mL to about 1,500 mg/mL, about 1,000 mg/mL to about 1,500 mg/mL, about 100 mg/mL to about 1,200 mg/mL, about 250 mg/mL to about 1,200 mg/mL, about 500 mg/mL to about 1,200 mg/mL, about 750 mg/mL to about 1,200 mg/mL, about 1,000 mg/mL to about 1,200 mg/mL, about 100 mg/mL to about 1,000 mg/mL, about 250 mg/mL to about 1,000 mg/mL, about 500 mg/mL to about 1,000 mg/mL, about 750 mg/mL to about 1,000 mg/mL, about 100 mg/mL to about 750 mg/mL, about 250 mg/mL to about 750 mg/mL, about 500 mg/mL to about 750 mg/mL, about 100 mg/mL to about 500 mg/mL, about 250 mg/mL to about 500 mg/mL, about 0.00001 mg/mL to about 0.0001 mg/mL, about 0.00001 mg/mL to about 0.001 mg/mL, about 0.00001 mg/mL to about 0.01 mg/mL, about 0.00001 mg/mL to about 0.1 mg/mL, about 0.00001 mg/mL to about 1 mg/mL, about 0.001 mg/mL to about 0.01 mg/mL, about 0.001 mg/mL to about 0.1 mg/mL, about 0.001 mg/mL to about 1 mg/mL, about 0.001 mg/mL to about 10 mg/mL, or about 0.001 mg/mL to about 100 mg/mL.

[0183] Aspects of the present specification disclose, in part, treating an individual suffering from cancer. As used herein, the term “treating,” refers to reducing or eliminating in an individual a clinical symptom of cancer; or delaying or preventing in an individual the onset of a clinical symptom of cancer. For example, the term “treating” can mean reducing a symptom of a condition characterized by a cancer, including, but not limited to, tumor size, by, e.g., at least 20%, at least 25%, at least 30%, at least 35%, at least 40%, at least 45%, at least 50%, at least 55%, at least 60%, at least 65%, at least 70%, at least 75%, at least 80%, at least 85%, at least 90% at least 95%, or at least 100%.

[0184] The actual symptoms associated with cancer are well known and can be determined by a person of ordinary skill in the art by taking into account factors, including, without limitation, the location of the cancer, the cause of the cancer, the severity of the cancer, and/or the tissue or organ affected by the cancer. Those of skill in the art will know the appropriate symptoms or indicators associated with a specific type of cancer and will know how to determine if an individual is a candidate for treatment as disclosed herein.

[0185] In aspects of this embodiment, a therapeutically effective amount of a chimeric molecule disclosed herein reduces a symptom associated with cancer by, e.g., at least 10%, at least 15%, at least 20%, at least 25%, at least 30%, at least 35%, at least 40%, at least 45%, at least 50%, at least 55%, at least 60%, at least 65%, at least 70%, at least 75%, at least 80%, at least 85%, at least 90%, at least 95% or at least 100%. In other aspects of this embodiment, a therapeutically effective amount of a chimeric molecule disclosed herein reduces a symptom associated with cancer by, e.g., at most 10%, at most 15%, at most 20%, at most 25%, at most 30%, at most 35%, at most 40%, at most 45%, at most 50%, at most 55%, at most 60%, at most 65%, at most 70%, at most 75%, at most 80%, at most 85%, at most 90%, at most 95% or at most 100%.

[0186] In yet other aspects of this embodiment, a therapeutically effective amount of a chimeric molecule disclosed herein reduces a symptom associated with cancer by, e.g., about 10% to about 100%, about 10% to about 90%, about 10% to about 80%, about 10% to about 70%, about 10% to about 60%, about 10% to about 50%, about 10% to about 40%, about 20% to about 100%, about 20% to about 90%, about 20% to about 80%, about 20% to about 20%, about 20% to about 60%, about 20% to about 50%, about 20% to about 40%, about 30% to about 100%, about 30% to about 90%, about 30% to about 80%, about 30% to about 70%, about 30% to about 60%, or about 30% to about 50%.

[0187] In yet other aspects of this embodiment, a therapeutically effective amount of a chimeric molecule disclosed herein generally is in the range of about 0.001 mg/kg/day to about 100 mg/kg/day. In aspects of this embodiment, an effective amount of a chimeric molecule disclosed herein may be, e.g., at least 0.001 mg/kg/day, at least 0.01 mg/kg/day, at least 0.1 mg/kg/day, at least 1.0 mg/kg/day, at least 5.0 mg/kg/day, at least 10 mg/kg/day, at least 15 mg/kg/day, at least 20 mg/kg/day, at least 25 mg/kg/day, at least 30 mg/kg/day, at least 35 mg/kg/day, at least 40 mg/kg/day, at least 45 mg/kg/day, or at least 50 mg/kg/day.

[0188] In other aspects of this embodiment, an effective amount of a chimeric molecule disclosed herein may be in the range of, e.g., about 0.001 mg/kg/day to about 10 mg/kg/day, about 0.001 mg/kg/day to about 15 mg/kg/day, about 0.001 mg/kg/day to about 20 mg/kg/day, about 0.001 mg/kg/day to about 25 mg/kg/day, about 0.001 mg/kg/day to about 30 mg/kg/day, about 0.001 mg/kg/day to about 35 mg/kg/day, about 0.001 mg/kg/day to about 40 mg/kg/day, about 0.001 mg/kg/day to about 45 mg/kg/day, about 0.001 mg/kg/day to about 50 mg/kg/day, about 0.001 mg/kg/day to about 75 mg/kg/day, or about 0.001 mg/kg/day to about 100 mg/kg/day.

[0189] In yet other aspects of this embodiment, an effective amount of a chimeric molecule disclosed herein may be in the range of, e.g., about 0.01 mg/kg/day to about 10 mg/kg/day, about 0.01 mg/kg/day to about 15 mg/kg/day, about 0.01 mg/kg/day to about 20 mg/kg/day, about 0.01 mg/kg/day to about 25 mg/kg/day, about 0.01 mg/kg/day to about 30 mg/kg/day, about 0.01 mg/kg/day to about 35 mg/kg/day, about 0.01 mg/kg/day to about 40 mg/kg/day, about 0.01 mg/kg/day to about 45 mg/kg/day, about 0.01 mg/kg/day to about 50 mg/kg/day, about 0.01 mg/kg/day to about 75 mg/kg/day, or about 0.01 mg/kg/day to about 100 mg/kg/day.

[0190] In still other aspects of this embodiment, an effective amount of a chimeric molecule disclosed herein may be in the range of, e.g., about 0.1 mg/kg/day to about 10 mg/kg/day, about 0.1 mg/kg/day to about 15 mg/kg/day, about 0.1 mg/kg/day to about 20 mg/kg/day, about 0.1 mg/kg/day to about 25 mg/kg/day, about 0.1 mg/kg/day to about 30 mg/kg/day, about 0.1 mg/kg/day to about 35 mg/kg/day, about 0.1 mg/kg/day to about 40 mg/kg/day, about 0.1 mg/kg/day to about 45 mg/kg/day, about 0.1 mg/kg/day to about 50 mg/kg/day, about 0.1 mg/kg/day to about 75 mg/kg/day, or about 0.1 mg/kg/day to about 100 mg/kg/day.

[0191] In other aspects of this embodiment, an effective amount of a chimeric molecule disclosed herein may be in the range of, e.g., about 1 mg/kg/day to about 10 mg/kg/day, about 1 mg/kg/day to about 15 mg/kg/day, about 1 mg/kg/day to about 20 mg/kg/day, about 1 mg/kg/day to about 25 mg/kg/day, about 1 mg/kg/day to about 30 mg/kg/day, about 1 mg/kg/day to about 35 mg/kg/day, about 1 mg/kg/day to about 40 mg/kg/day, about 1 mg/kg/day to about 45 mg/kg/day, about 1 mg/kg/day to about 50 mg/kg/day, about 1 mg/kg/day to about 75 mg/kg/day, or about 1 mg/kg/day to about 100 mg/kg/day.

[0192] In yet other aspects of this embodiment, an effective amount of a chimeric molecule disclosed herein may be in the range of, e.g., about 5 mg/kg/day to about 10 mg/kg/day, about 5 mg/kg/day to about 15 mg/kg/day, about 5 mg/kg/day to about 20 mg/kg/day, about 5 mg/kg/day to about 25 mg/kg/day, about 5 mg/kg/day to about 30 mg/kg/day, about 5 mg/kg/day to about 35 mg/kg/day, about 5 mg/kg/day to about 40 mg/kg/day, about 5 mg/kg/day to about 45 mg/kg/day, about 5 mg/kg/day to about 50 mg/kg/day, about 5 mg/kg/day to about 75 mg/kg/day, or about 5 mg/kg/day to about 100 mg/kg/day.

[0193] In liquid and semi-solid formulations, a concentration of a chimeric molecule disclosed herein typically may be between about 50 mg/mL to about 1,000 mg/mL. In aspects of this embodiment, a therapeutically effective amount of a chimeric molecule disclosed herein may be from, e.g., about 50 mg/mL to about 100 mg/mL, about 50 mg/mL to about 200 mg/mL, about 50 mg/mL to about 300 mg/mL, about 50 mg/mL to about 400 mg/mL, about 50 mg/mL to about 500 mg/mL, about 50 mg/mL to about 600 mg/mL, about 50 mg/mL to about 700 mg/mL, about 50 mg/mL to about 800 mg/mL, about 50 mg/mL to about 900 mg/mL, about 50 mg/mL to about 1,000 mg/mL, about 100 mg/mL to about 200 mg/mL, about 100 mg/mL to about 300 mg/mL, about 100 mg/mL to about 400 mg/mL, about 100 mg/mL to about 500 mg/mL, about 100 mg/mL to about 600 mg/mL, about 100 mg/mL to about 700 mg/mL, about 100 mg/mL to about 800 mg/mL, about 100 mg/mL to about 900 mg/mL, about 100 mg/mL to about 1,000 mg/mL, about 200 mg/mL to about 300 mg/mL, about 200 mg/mL to about 400 mg/mL, about 200 mg/mL to about 500 mg/mL, about 200 mg/mL to about 600 mg/mL, about 200 mg/mL to about 700 mg/mL, about 200 mg/mL to about 800 mg/mL, about 200 mg/mL to about 900 mg/mL, about 200 mg/mL to about 1,000 mg/mL, about 300 mg/mL to about 400 mg/mL, about 300 mg/mL to about 500 mg/mL, about 300 mg/mL to about 600 mg/mL, about 300 mg/mL to about 700 mg/mL, about 300 mg/mL to about 800 mg/mL, about 300 mg/mL to about 900 mg/mL, about 300 mg/mL to about 1,000 mg/mL, about 400 mg/mL to about 500 mg/mL, about 400 mg/mL to about 600 mg/mL, about 400 mg/mL to about 700 mg/mL, about 400 mg/mL to about 800 mg/mL, about 400 mg/mL to about 900 mg/mL, about 400 mg/mL to about 1,000 mg/mL, about 500 mg/mL to about 600 mg/mL, about 500 mg/mL to about 700 mg/mL, about 500 mg/mL to about 800 mg/mL, about 500 mg/mL to about 900 mg/mL, about 500 mg/mL to about 1,000 mg/mL, about 600 mg/mL to about 700 mg/mL, about 600 mg/mL to about 800 mg/mL, about 600 mg/mL to about 900 mg/mL, or about 600 mg/mL to about 1,000 mg/mL.

[0194] Dosing can be single dosage or cumulative (serial dosing), and can be readily determined by one skilled in the art. For instance, treatment of a cancer may comprise a one-time administration of an effective dose of a pharmaceutical composition disclosed herein. Alternatively, treatment of a cancer may comprise multiple administrations of an effective dose of a pharmaceutical composition carried out over a range of time periods, such as, e.g., once daily, twice daily, trice daily, once every few days, or once weekly. The timing of administration can vary from individual to individual, depending upon such factors as the severity of an individual's symptoms. For example, an effective dose of a pharmaceutical composition disclosed herein can be administered to an individual once daily for an indefinite period of time, or until the individual no longer requires therapy. A person of ordinary skill in the art will recognize that the condition of the individual can be monitored throughout the course of treatment and that the effective amount of a pharmaceutical composition disclosed herein that is administered can be adjusted accordingly.

[0195] In one embodiment, a chimeric molecule disclosed herein is capable of reducing the number of cancer cells or tumor size in an individual suffering from a cancer by, e.g., at least 10%, at least 15%, at least 20%, at least 25%, at least 30%, at least 35%, at least 40%, at least 45%, at least 50%, at least 55%, at least 60%, at least 65%, at least 70%, at least 75%, at least 80%, at least 85%, at least 90% or at least 95% as compared to a patient not receiving the same treatment. In other aspects of this embodiment, a chimeric molecule is capable of reducing the number of cancer cells or tumor size in an individual suffering from a cancer by, e.g., about 10% to about 100%, about 20% to about 100%, about 30% to about 100%, about 40% to about 100%, about 50% to about 100%, about 60% to about 100%, about 70% to about 100%, about 80% to about 100%, about 10% to about 90%, about 20% to about 90%, about 30% to about 90%, about 40% to about 90%, about 50% to about 90%, about 60% to about 90%, about 70% to about 90%, about 10% to about 80%, about 20% to about 80%, about 30% to about 80%, about 40% to about 80%, about 50% to about 80%, or about 60% to about 80%, about 10% to about 70%, about 20% to about 70%, about 30% to about 70%, about 40% to about 70%, or about 50% to about 70% as compared to a patient not receiving the same treatment.

[0196] In a further embodiment, a chimeric molecule has half-lives of 2 hours, 3 hours, 4 hours, 5 hours, 6 hours, 7 hours, 8 hours, 9 hours, 10 hours, 11 hours, 12 hours, 13 hours, 14 hours, 15 hours, 16 hours, 17 hours, 18 hours, 19 hours, 20 hours, 21 hours, 22 hours, 23 hours, 1 day, 2 days, 3 days, 4 days, 5 days, 6 days, 7 days, 1 week, 2 weeks, 3 weeks, 4 weeks, one month, two months, three months, four months or more.

[0197] In an embodiment, the period of administration of a chimeric molecule is for 1 day, 2 days, 3 days, 4 days, 5 days, 6 days, 7 days, 8 days, 9 days, 10 days, 11 days, 12 days, 13 days, 14 days, 3 weeks, 4 weeks, 5 weeks, 6 weeks, 7 weeks, 8 weeks, 9 weeks, 10 weeks, 11 weeks, 12 weeks, 4 months, 5 months, 6 months, 7 months, 8 months, 9 months, 10 months, 11 months, 12 months, or more. In a further embodiment, a period of during which administration is stopped is for 1 day, 2 days, 3 days, 4 days, 5 days, 6 days, 7 days, 8 days, 9 days, 10 days, 11 days, 12 days, 13 days, 14 days, 3 weeks, 4 weeks, 5 weeks, 6 weeks, 7 weeks, 8 weeks, 9 weeks, 10 weeks, 11 weeks, 12 weeks, 4 months, 5 months, 6 months, 7 months, 8 months, 9 months, 10 months, 11 months, 12 months, or more.

[0198] In aspects of this embodiment, a therapeutically effective amount of a chimeric molecule disclosed herein reduces or maintains a cancer cell population and/or tumor cell size in an individual by, e.g., at least 10%, at least 15%, at least 20%, at least 25%, at least 30%, at least 35%, at least 40%, at least 45%, at least 50%, at least 55%, at least 60%, at least 65%, at least 70%, at least 75%, at least 80%, at least 85%, at least 90%, at least 95% or at least 100%. In other aspects of this embodiment, a therapeutically effective amount of a chimeric molecule disclosed herein reduces or maintains a cancer cell population and/or tumor cell size in an individual by, e.g., at most 10%, at most 15%, at most 20%, at most 25%, at most 30%, at most 35%, at most 40%, at most 45%, at most 50%, at most 55%, at most 60%, at most 65%, at most 70%, at most 75%, at most 80%, at most 85%, at most 90%, at most 95% or at most 100%. In yet other aspects of this embodiment, a therapeutically effective amount of a chimeric molecule disclosed herein reduces or maintains a cancer cell population and/or tumor cell size in an individual by, e.g., about 10% to about 100%, about 10% to about 90%, about 10% to about 80%, about 10% to about 70%, about 10% to about 60%, about 10% to about 50%, about 10% to about 40%, about 20% to about 100%, about 20% to about 90%, about 20% to about 80%, about 20% to about 20%, about 20% to about 60%, about 20% to about 50%, about 20% to about 40%, about 30% to about 100%, about 30% to about 90%, about 30% to about 80%, about 30% to about 70%, about 30% to about 60%, or about 30% to about 50%.

[0199] Typically, any individual who is a candidate for treatment is a candidate with some form of cancer, whether the cancer is benign or malignant, a tumor, solid or otherwise, a cancer call not located in a tumor or some other form of cancer. Among the most common types of cancer include, but are not limited to, bladder cancer, breast cancer, colon and rectal cancer, endometrial cancer, kidney cancer, renal cancer, leukemia, lung cancer, melanoma, non-Hodgkins lymphoma, pancreatic cancer, prostate cancer, stomach cancer and thyroid cancer. Pre-operative evaluation typically includes routine history and physical examination in addition to thorough informed consent disclosing all relevant risks and benefits of the procedure.

[0200] In still other aspects of this embodiment, a pharmaceutical composition disclosed herein may be in the range of, e.g., about 10 μg to about 250 μg, about 10 μg to about 500 μg, about 10 μg to about 750 μg, about 10 μg to about 1,000 μg, about 10 μg to about 1,500 μg, about 50 μg to about 250 μg, about 50 μg to about 500 μg, about 50 μg to about 750 μg, about 50 μg to about 1,000 μg, about 50 μg to about 1,500 μg, about 100 μg to about 250 μg, about 100 μg to about 500 μg, about 100 μg to about 750 μg, about 100 μg to about 1,000 μg, about 100 μg to about 1,500 μg, about 200 μg to about 500 μg, about 200 μg to about 750 μg, about 200 μg to about 1,000 μg, about 200 μg to about 1,500 μg, about 10 mg to about 250 mg, about 10 mg to about 500 mg, about 10 mg to about 750 mg, about 10 mg to about 1,000 mg, about 10 mg to about 1,500 mg, about 50 mg to about 250 mg, about 50 mg to about 500 mg, about 50 mg to about 750 mg, about 50 mg to about 1,000 mg, about 50 mg to about 1,500 mg, about 100 mg to about 250 mg, about 100 mg to about 500 mg, about 100 mg to about 750 mg, about 100 mg to about 1,000 mg, about 100 mg to about 1,500 mg, about 200 mg to about 500 mg, about 200 mg to about 750 mg, about 200 mg to about 1,000 mg, about 200 mg to about 1,500 mg, about 5 mg to about 1,500 mg, about 5 mg to about 1,000 mg, or about 5 mg to about 250 mg of a chimeric molecule.

### IV. Methods of Treatment

[0201] The presently disclosed chimeric molecules or prodrugs can be used to treat a disease, depending on the antigen bound by the antigen-binding domain. In some embodiments, the chimeric molecule or prodrugs disclosed herein are used to treat cancer. In some embodiments, the chimeric molecule or prodrugs are used to treat an infection, for example when the drug molecule is an antibacterial agent or an antiviral agent.

[0202] In some embodiments, a method of treating a disease (such as cancer, a viral infection, or a bacterial infection) in a subject comprises administering to the subject an effective amount of the presently disclosed chimeric molecule or prodrugs.

[0203] In some embodiments, the cancer is a solid cancer. In some embodiments, the cancer is a blood cancer. Exemplary cancers that may be treated include, but are not limited to, leukemia, lymphoma, kidney cancer, bladder cancer, urinary tract cancer, cervical cancer, brain cancer, head and neck cancer, skin cancer, uterine cancer, testicular cancer, esophageal cancer, liver cancer, colorectal cancer, stomach cancer, squamous cell carcinoma, prostate cancer, pancreatic cancer, lung cancer, cholangiocarcinoma, breast cancer, and ovarian cancer.

[0204] In some embodiments, the presently disclosed chimeric molecule or prodrugs are used to treat a bacterial infection such as sepsis. In some embodiments, the bacteria causing the bacterial infection are drug-resistant bacteria. In some embodiments, the antigen-binding moiety binds to a bacterial antigen.

[0205] In some embodiments, the chimeric molecule is used to treat a viral infection. In some embodiments, the virus causing the viral infection is hepatitis C (HCV), hepatitis B (HBV), human immunodeficiency virus (HIV), a human papilloma virus (HPV). In some embodiments, the antigen-binding moiety binds to a viral antigen.

[0206] Generally, dosages and routes of administration of the present pharmaceutical compositions are determined according to the size and condition of the subject, according to standard pharmaceutical practice. In some embodiments, the pharmaceutical composition is administered to a subject through any route, including orally, transdermally, by inhalation, intravenously, intra-arterially, intramuscularly, direct application to a wound site, application to a surgical site, intraperitoneally, by suppository, subcutaneously, intradermally, transcutaneously, by nebulization, intrapleurally, intraventricularly, intra-articularly, intraocularly, or intraspinally. In some embodiments, the composition is administered to a subject intravenously.

[0207] In some embodiments, the prodrug is administered to a subject in need a single dose or a repeated dose. In some embodiments, the doses are given to a subject once per day, twice per day, three times per day, or four or more times per day. In some embodiments, about 1 or more (such as about 2, 3, 4, 5, 6, or 7 or more) doses are given in a week. In some embodiments, the antibody fusion molecule conjugated to the drug is administered weekly, once every 2 weeks, once every 3 weeks, once every 4 weeks, weekly for two weeks out of 3 weeks, or weekly for 3 weeks out of 4 weeks. In some embodiments, multiple doses are given over the course of days, weeks, months, or years. In some embodiments, a course of treatment is about 1 or more doses (such as about 2, 2, 3, 4, 5, 7, 10, 15, or 20 or more doses).

[0208] In some embodiments, the IL-12 prodrug is administered to a subject in combination with a second pharmaceutical composition, wherein the second pharmaceutical composition comprises an active ingredient selected from a cytokine other than IL-12 or its fusion molecule, an antibody against PD-1, an antibody against PD-L1, an antibody against CTLA-4, an antibody against CD47, a PD-1 antibody-IL-2 fusion molecule, a PD-1-IL-7 fusion molecule, a PD-1 antibody-IL-15 fusion molecule, and a PD-1-IL-21 fusion molecule.

### V. Methods of Making the Chimeric Molecules or Prodrugs

[0209] The presently disclosed chimeric molecules or prodrugs can be produced using recombinant DNA methods. Nucleic acid molecules encoding the polypeptide or the fusion polypeptide of a chimeric molecule or a prodrug can be isolated and inserted into one or more vectors for further cloning and/or expression in a host cell. Such nucleic acid molecules may be readily isolated and sequenced using conventional methods. Suitable host cells for cloning or expression of fusion polypeptide vectors include prokaryotic cells or eukaryotic cells. Exemplary host cells include Chinese Hamster Ovary (CHO) cells or human embryonic kidney cells (e.g., HEK293).

[0210] Expression host cells express the chimeric molecule. After an expression period, the host cells can by lysed and the chimeric molecule or the prodrug can be purified. Exemplary purification methods include liquid chromatography, such as ion exchange chromatography, affinity chromatography (such as Protein A affinity chromatography), or size exclusion chromatography.

### EXEMPLARY EMBODIMENTS

[0211] Further particular embodiments of the present disclosure are described as follows. These embodiments are intended to illustrate the compositions and methods described in the present disclosure and are not intended to limit the scope of the present disclosure.

[0212] 1. An isolated mutant interleukin-12 (IL-12) polypeptide comprising a p40 subunit polypeptide and a mutant p35 subunit polypeptide, wherein a mutant p35 polypeptide comprises the amino acid sequence of SEQ ID NO: 6 with up to three amino acid substitutions, wherein one of the mutations is at position 40.

[0213] 2. An isolated mutant interleukin-12 (IL-12) polypeptide comprising a mutant p35 subunit polypeptide, wherein a mutant p35 subunit polypeptide comprises the amino acid sequence of SEQ ID NO: 6 with up to seven amino acid substitutions, wherein one of the mutations is selected from K128A, F166K, T36A, L37E, E38A, F39A, E38A, F39A, Y40A, P41G, T43A, S44G, E45A, E46A, D48A, H49A, E50A, E79A, T80A, F82A, and N71Q.

[0214] 3. The mutant interleukin-12 polypeptide of any one of embodiments 1-2, further comprising a mutant p40 subunit polypeptide.

[0215] 4. The mutant interleukin-12 polypeptide of any one of embodiments 1-3, wherein a mutant p40 subunit comprises Lys260Ala and Arg261Ala (numbering according to SEQ ID NO: 5).

[0216] 5. The mutant interleukin-12 polypeptide of any one of embodiments 1-3, wherein a p40 subunit comprises an amino acid sequence selected from SEQ ID NOs: 5, 46, 63, and 98 or an amino acid sequence at least 95% identical or at least 99% identical as one selected from SEQ ID NOs: 5, 46, 63, and 98.

[0217] 6. A chimeric molecule, which comprises the mutant interleukin-12 polypeptide of any one of embodiments 1 to 5 and a carrier, wherein a mutant IL-12 polypeptide is operationally linked to a carrier, wherein a carrier is selected from a PEG molecule, an albumin molecule, an albumin fragment, an IgG Fc, and an antigen binding molecule.

[0218] 7. Chimeric molecule of embodiment 6, wherein a carrier is an antigen binding molecule, and wherein said antigen binding molecule is an antibody or an antibody fragment.

[0219] 8. Chimeric molecule of embodiment 6, wherein a carrier is an antigen binding molecule, and wherein said antigen binding molecule is a bispecific antibody.

[0220] 9. Chimeric molecule of any of embodiments 7 and 8, wherein said antigen is expressed on an immune cell.

[0221] 10. Chimeric molecule of any of embodiments 7 and 8, wherein said antigen is expressed on a tumor cell or a cell in a tumor microenvironment.

[0222] 11. Chimeric molecule of any of embodiments 7 and 8, wherein said antigen is selected from the group of PD-L1, PD-I, LAG-3, TIM-3, TIGIT, CD-8, CD16A, NKG2A, NKG2D, NKp46, SIRPalpha, CD47, CD38, Fibroblast Activation Protein alpha (FAPalpha), CEA, BCMA, CD20, Trop-2, HER2, 5T4, the Melanoma-associated Chondroitin Sulfate Proteoglycan (MCSP), PSMA, EGFR, and Claudin 18.2.

[0223] 12. Chimeric molecule of any of embodiments 7-11, wherein said chimeric molecule further comprises a masking moiety (MM); wherein said masking moiety binds to p40 subunit and/or p35 subunit and inhibits a biological activity of IL-12.

[0224] 13. Chimeric molecule of any of embodiments 7-11, wherein said chimeric molecule further comprises a masking moiety (MM); wherein said masking moiety comprises an amino acid sequence selected from SEQ ID NOs: 1, 2, 3, and 4, or an amino acid sequence at least 90%, at least 95%, or at least 99% identical as SEQ ID NO: 1, 2, 3, or 4.

[0225] 14. A chimeric molecules which comprises an IL-12 p40 subunit (p40), an IL-12 p35 subunit (p35), a masking moiety (MM), and a carrier (C); wherein a p40 subunit comprises a mutation, mutations, or a deletion of one or more amino acids; and wherein said masking moiety comprises an amino acid sequence selected from SEQ ID NOs: 1, 2, 3, and 4, or an amino acid sequence at least 90%, at least 95%, or at least 99% identical as SEQ ID NO: 1, 2, 3, or 4.

[0226] 15. Chimeric molecule of embodiment 14, wherein said p40 subunit comprises an amino wherein a p40 subunit comprises an amino acid sequence selected from SEQ ID NOs: 5, 46, 63, and 98 or an amino acid sequence at least 95% identical or at least 99% identical as one selected from SEQ ID NOs: 5, 46, 63, and 98

[0227] 16. A chimeric molecule comprises an IL-12 p40 subunit (p40), an IL-12 p35 subunit (p35), a masking moiety (MM), and a carrier (C); wherein said masking moiety (MM) inhibits the binding of the cytokine moiety with the IL-12 receptor β1 subunit; and wherein said p35 subunit comprises mutation or mutations which reduce the binding affinity of the cytokine moiety with the IL-12 receptor β2 subunit.

[0228] 17. A chimeric molecule comprises an IL-12 p40 subunit (p40), an IL-12 p35 subunit (p35), a masking moiety (MM), and a carrier (C); wherein said masking moiety (MM) inhibits the binding of p40 subunit with the IL-12 receptor β1 subunit; and wherein said p35 subunit comprises mutation or mutations which reduce the binding affinity of the cytokine moiety with the IL-12 receptor β2 subunit.

[0229] 18. Chimeric molecule of embodiment 16 or 17, wherein a p35 subunit comprises a mutation at Tyr40 (numbering according to SEQ ID NO: 6).

[0230] 19. Chimeric molecule of embodiment 16 or 17, wherein a p35 subunit comprises the mutation Tyr40Ala (numbering according to SEQ ID NO: 6).

[0231] 20. Chimeric molecule of any of the embodiments 16-19, wherein said masking moiety comprises an amino acid sequence selected from SEQ ID NOs: 1, 2, 3, and 4, or an amino acid sequence at least 90%, at least 95%, or at least 99% identical as SEQ ID NO: 1, 2, 3, or 4.

[0232] 21. A chimeric molecule which is activatable at the site of a tumor, in the tumor microenvironment, or near a tumor; wherein a chimeric molecule comprises an IL-12 p40 subunit (p40), an IL-12 p35 subunit (p35), a masking moiety (MM), and a carrier (C); wherein said carrier moiety comprises an antigen-binding moiety, which binds to an antigen expressed on an immune cell; wherein said immune cell is infiltered into a tumor or in the tumor microenvironment or locates near a tumor; and wherein said chimeric molecule has higher activity stimulating an immune cell expressing a targeted antigen compared to the ones without expressing a antigen.

[0233] 22. Chimeric molecule of embodiment 21, which does not comprises any cleavable peptide linker; or which comprise a cleavable peptide linker, but the activation is not dependent on the cleavage of the cleavable linker.

[0234] 23. A chimeric molecule, wherein: (a) it comprises IL-12 cytokine moiety, a masking moiety, and a carrier which comprises an antigen-binding moiety which binds to antigen expressed on an immune cell; (b) does not comprises any cleavable peptide linker; and (c) is able to activate an immune cell which expresses an antigen targeted by the carrier.

[0235] 24. Chimeric molecule of any of the embodiments 21-23, wherein said carrier moiety comprises an antigen-binding moiety, which binds to an antigen selected from PD-1, TIM-3, TIGIT, LAG-3, CD16A, NKG2A, NKG2D, KIR, SIRPalpha, and NKp46.

[0236] 25. Chimeric molecule of any of embodiments 21-24, wherein said carrier comprises an antigen-binding moiety which binds to PD-1; wherein an antigen-binding moiety comprises the same heavy chain variable domain (VH) and the same light chain variable domain (VL) as that of pembrolizumab or nivolumab.

[0237] 26. Chimeric molecule of embodiment 25, wherein said VH domain comprises an amino acid sequence of SEQ ID NO: 101 or at least 90% identical as that of SEQ ID NO: 101 and said VL domain comprises an amino acid sequence of SEQ ID NO: 102 or at least 90% identical as that of SEQ ID NO: 102.

[0238] 27. Chimeric molecule of any of embodiments 21-24, wherein said carrier comprises an antigen-binding moiety which binds to LAG-3; wherein said LAG-3-binding moiety comprises an amino acid sequence selected from SEQ ID NOs: 69-77, or at least 90% identical to one selected from SEQ ID NOs: 69-77.

[0239] 28. A chimeric molecule comprises an IL-12 p40 subunit (p40), an IL-12 p35 subunit (p35), a masking moiety (MM), a carrier (C), and a cleavable peptide linker which is cleavable by a protease preferentially expressed at the site of a tumor, in the tumor microenvironment, or near a tumor; wherein said carrier comprises an Fc domain of an IgG; wherein said masking moiety is linked directly or indirectly to the carrier through a non-cleavable peptide linker; and wherein said p40 subunit of IL-12 is linked to the carried directly or indirectly through a cleavable peptide linker.

[0240] 29. A chimeric molecule comprises an IL-12 p40 subunit (p40), an IL-12 p35 subunit (p35), a masking moiety (MM), a carrier (C), and a cleavable peptide linker which is cleavable by a protease preferentially expressed at the site of a tumor, in the tumor microenvironment, or near a tumor; wherein said carrier comprises an antigen-binding moiety; wherein said masking moiety is linked directly or indirectly to the carrier through a cleavable peptide linker; and wherein said p40 subunit of IL-12 is linked to the carried directly or indirectly optionally through a non-cleavable peptide linker.

[0241] 30. Chimeric molecule of embodiment 6, which further comprises a cleavable peptide linker which is cleavable by a protease preferentially expressed at the site of a tumor, in the tumor microenvironment, or near a tumor; wherein said carrier comprises an Fc domain of an IgG; wherein said masking moiety is linked directly or indirectly to the carrier through a non-cleavable peptide linker; and wherein said p40 subunit of IL-12 is linked to the carried directly or indirectly through a cleavable peptide linker.

[0242] 31. Chimeric molecule of embodiment 6, which further comprises a cleavable peptide linker which is cleavable by a protease preferentially expressed at the site of a tumor, in the tumor microenvironment, or near a tumor; wherein said carrier comprises an antigen-binding moiety; wherein said masking moiety is linked directly or indirectly to the carrier through a cleavable peptide linker; and wherein said p40 subunit of IL-12 is linked to the carried directly or indirectly optionally through a non-cleavable peptide linker.

[0243] 32. A chimeric molecule, which comprises an IL-12 p40 subunit (p40), an IL-12 p35 subunit (p35), a masking moiety (MM), and a carrier (C); wherein said masking moiety is directly fused to the carrier optionally through a cleavable or non-cleavable peptide linker; wherein said p40 subunit is directly fused to the carrier optionally through a cleavable or non-cleavable peptide linker; and wherein said p35 subunit is fused to the p40 subunit through a peptide linker of 3 to 10 amino acids in length, optionally comprising GGS, GGGGS or GGGGSGGGGS.

[0244] 33. Chimeric molecule of any of embodiments 6-31, wherein said masking moiety is directly fused to the carrier optionally through a cleavable or non-cleavable peptide linker; wherein said p40 subunit is directly fused to the carrier optionally through a cleavable or non-cleavable peptide linker; and wherein said p35 subunit is fused to the p40 subunit through a peptide linker of of 5 to 10 amino acids in length, optionally comprising GGGGS or GGGGSGGGGS.

[0245] 34. Chimeric molecule of embodiment 32, wherein said carrier moiety comprises an antigen-binding moiety, which binds an antigen selected from PD-1, TIM-3, TIGIT, LAG-3, CD16A, NKG2A, NKG2D, KIR, SIRPalpha, and NKp46.

[0246] 35. Chimeric molecule of embodiment 32, wherein said carrier comprises an antigen-binding moiety which binds to PD-1; wherein said antigen-binding moiety comprises the same heavy chain variable domain (VH) and the same light chain variable domain (VL) as that of pembrolizumab or nivolumab.

[0247] 36. Chimeric molecule of embodiment 35, wherein said VH domain comprises an amino acid sequence of SEQ ID NO: 101 or at least 90% identical as that of SEQ ID NO: 101 and said VL domain comprises an amino acid sequence of SEQ ID NO: 102 or at least 90% identical as that of SEQ ID NO: 102.

[0248] 37. Chimeric molecule of embodiment 32, wherein said carrier comprises an antigen-binding moiety which binds to LAG-3; wherein said LAG-3-binding moiety comprises an amino acid sequence selected from SEQ ID NOs: 69-77, or at least 90% identical to one selected from SEQ ID NOs: 69-77.

[0249] 38. Chimeric molecule of any of embodiments 32-37, wherein said masking moiety amino acid sequence selected from SEQ ID NOs: 1, 2, 3, and 4, or an amino acid sequence at least 90%, at least 95%, or at least 99% identical as SEQ ID NO: 1, 2, 3, or 4.

[0250] 39. Chimeric molecule of any of embodiments 32, 34-38, wherein a p40 subunit comprises an amino acid sequence SEQ ID NOs: 5, 46, 63, and 98 or an amino acid sequence at least 95% identical or at least 99% identical as one selected from SEQ ID NOs: 5, 46, 63, and 98.

[0251] 40. Chimeric molecule of any of embodiments 32, 34-39, wherein a p35 subunit comprises a mutation at Y40 (numbering according to SEQ ID NO: 6).

[0252] 41. Chimeric molecule of any of embodiments 32, 34-39, wherein said p35 subunit comprises mutation Y40A (numbering according to SEQ ID NO: 6).

[0253] 42. Chimeric molecule of any of embodiments 32-41, wherein said carrier comprises a first Fc polypeptide and a second Fc polypeptide; and wherein said masking moiety is fused to the N-terminus of the first Fc polypeptide, and a p40 subunit is fused to the N-terminus of the second Fc polypeptide.

[0254] 43. Chimeric molecule of any of embodiments 32-41, wherein said carrier comprises a first Fc polypeptide and a second Fc polypeptide; and wherein said masking moiety is fused to the C-terminus of the first Fc polypeptide, and a p40 subunit is fused to the C-terminus of the second Fc polypeptide.

[0255] 44. Chimeric molecule of any of embodiments 32-41, wherein said carrier is an antibody comprises a first heavy chain polypeptide and a second heavy chain polypeptide; and wherein said masking moiety is fused to the N-terminus of the first heavy chain polypeptide, and a p40 subunit is fused to the N-terminus of the second heavy chain polypeptide.

[0256] 45. Chimeric molecule of any of embodiments 32-41, wherein said carrier is an antibody comprises a first heavy chain polypeptide and a second heavy chain polypeptide; and wherein said masking moiety is fused to the C-terminus of the first heavy chain polypeptide, and a p40 subunit is fused to the C-terminus of the second heavy chain polypeptide.

[0257] 46. Chimeric molecule of any of embodiments 42-45, wherein said Fc polypeptides or the heavy chain polypeptides comprise knobs-into-holes mutations.

[0258] 47. Chimeric molecule of any of embodiments 42-45, which has higher main peak purity by SEC-HPLC compared to the chimeric molecules with the same structure except that the linkers between p40 and p35 subunits comprises a peptide linker with amino acid sequence GGGGSGGGGSGGGGS.

[0259] 48. Chimeric molecule of any one of embodiments 12-22, 24-47, which comprises a cleavable peptide linker, which is cleavable by a protease or proteases found at a tumor site or its surrounding environment.

[0260] 49. Chimeric molecule of embodiment 48, wherein a cleavable peptide linker comprises a substrate of uPA, MMP2 and/or MMP9.

[0261] 50. Chimeric molecule of embodiment 48, wherein a cleavable peptide linker comprises substrates of both uPA and MMP2, both uPA and MMP9, or uPA, MMP2 and MMP9.

[0262] 51. Chimeric molecule of embodiment 48, wherein a cleavable peptide linker contains an enzyme substrate amino acid sequence selected from LSGRSDNH, ISSGLLSS, and GPLGVR.

[0263] 52. Chimeric molecule of embodiment 48, wherein a cleavable peptide linker comprises an amino acid sequence selected from SEQ ID NOs: 25-45.

[0264] 53. A polynucleotide or polynucleotides which encodes the mutant IL-12 of any one of embodiments 1-5.

[0265] 56. A polynucleotide or polynucleotides which encode the chimeric molecule of any one of embodiments 6-52.

[0266] 54. An expression vector or vectors comprising the polynucleotide or polynucleotides of embodiment 52 or 53.

[0267] 55. A host cell transfected with the vector of embodiment 54.

[0268] 56. Host cell of embodiment 55, wherein a host cell has the gene or genes encoding uPA, MMP-2 and/or MMP-9 knocked out.

[0269] 57. A method of producing a mutant IL-12 of any one of embodiments 1-5, a chimeric molecule of any of embodiments 6-52, comprising culturing the host cell of embodiment 55 or 56.

[0270] 58. A pharmaceutical composition comprising as active ingredient the mutant IL-12 of any one embodiments 1-5 or the chimeric molecule of any one of embodiments 6-52.

[0271] 59. A pharmaceutical composition comprising as active ingredient the chimeric molecule of any one of embodiments 6-52.

[0272] 60. A method of treating breast, lung, pancreatic, esophageal, medullary thyroid, ovarian, uterine, prostatic, testicular, colon, rectal or stomach cancer, or infectious disease in a human subject in need thereof, comprising administering to the human subject a pharmaceutical composition of embodiment 58 or 59.

[0273] In order that this invention may be better understood, the following examples are set forth. These examples are for purposes of illustration only and are not to be construed as limiting the scope of the invention in any manner.

### EXAMPLES

### Example 1. Transient Transfection of ExpiCHO Cells

[0274] Expression plasmids were co-transfected into 6×10⁶ cell/ml freestyle ExpiCHO cells at 1 μg/ml using ExpiFectamine CHO Transfection kit (Gibco). Various ratios of the expression plasmids were tested in order to achieve higher titer and/or better purity. The cell cultures were harvested 7 days after transfection by centrifuging at 9,000 rpm for 45 min followed by 0.22 μM filtration.

### Example 2. Purification of Chimeric Molecules and SEC-HPLC Purity Analysis

[0275] The purifications of the proteins of the IL-12 chimeric molecules were carried out using Protein A affinity chromatography. Additional purification steps were carried out using additional chromatography and filtration steps. For example, chromatography steps with resins such as Capto MMC ImpRes, Capto Adhere, Capto SP, and/or Capto Q were used for further purification of the chimeric molecules.

[0276] B mask MX06-75 is a chimeric molecule comprising Fc as the carrier, which further comprises a scFv derived from Briakinnumab as the masking moiety. It was purified using chromatography steps with Capto Adhere and Capto MMC resins after the Protein A affinity purification. Umask LL25-18 is a chimeric molecule comprising Fc as the carrier, which further comprises a scFv derived from Ustekinumab as the masking moiety. It was also purified using chromatography steps with Capto Adhere and Capto MMC resins after the Protein A affinity purification. The purities of the samples were tested by SEC-HPLC. The sequence information of the molecules is listed in Table 4.

TABLE 4
Sequence Information of Chimeric Molecules Comprising Fc as Their Carriers

| Molecule | Chain 1 | | Chain 2 | | ratio | Description |
|---|---|---|---|---|---|---|
| B mask | CX5.43.1 | SEQ ID | CX10.64.2 | SEQ ID | 1:2 | IL-12/B mask |
| MX06-75 | | NO: 81 | | NO: 80 | | non-cleavable |
| U mask | | | CX5.47.4 | SEQ ID | 1:1 | IL-12/U mask |
| LL25-18 | | | | NO: 97 | | cleavable |

[0277] ASKG129A, ASKG129B, and ASKG129C are chimeric molecules which comprise the single domain antibody against LAG-3. They were purified using chromatography steps with Capto MMC Impres and Capto Q Impres resins after the Protein A affinity purification. The sequence information of the molecules is listed in Table 5.

TABLE 5
Sequence Information of Chimeric Molecules Comprising A
Single Domain Antibody Against LAG-3 as Their Carriers

| Molecule Name | | Chain 1 (Cytokine) | | Chain 2 (Mask) | | ratio | Description |
|---|---|---|---|---|---|---|---|
| ASKG129A | LL25-55 | CX14.51.3 | SEQ ID | CX14.51.1 | SEQ ID | 1:1 | WT IL-12 |
| | | | NO: 124 | | NO: 115 | | |
| ASKG129B | LL25-58E2 | CX14.51.4 | SEQ ID | CX14.51.1 | | 1:1 | Mutant p35 |
| | | | NO: 137 | | | | with Y40A |
| ASKG129C | LL25-52 | CX14.51.5 | SEQ ID | CX14.51.1 | | 1:1 | Mutant p40 with |
| | | | NO: 128 | | | | K260A/R261A |

[0278] SEC-HPLC was carried out using an Agilent 1100 Series of HPLC system with a TSKgel G3000SWXL column (7.8 mmIDX 30 cm, 5 μm particle size) ordered from Tosoh Bioscience. A sample of up to 100 μl was loaded. The column was run with a buffer containing 200 mM K₃PO₄, 250 mM KCl, pH 6.5. The flow rate was 0.5 ml/min. The column was run at room temperature. The protein elution was monitored both at 220 nm and 280 nm.

[0279] Alternatively, SEC-HPLC was also carried out using an Agilent 1100 Series of HPLC system with Phenomenex column #H21-260882 (4.6 mmIDX 30 cm, 3 μm particle size) ordered from Phenomenex. A sample of approximately 3 μg of a chimeric molecule was loaded. The column was run with a buffer containing 200 mM K₃PO₄, 250 mM KCl, pH 6.22. The flow rate was 0.35 ml/min. The column was run at 30° C. The protein elution was monitored at 220 nm.

[0280] The exemplary SEC-HPLC purities of the purified ASKG129A, ASKG129B and ASKG129C are shown in FIG. 16A (ASKG129A, Lot #LL25-55), 16B (ASKG129B, Lot #LL25-64), and 16C (ASKG129C Lot #LL25-52). The main peak purities were approximately 95% or higher.

### Example 3. SDS-PAGE Analysis

[0281] 10 μl of the culture supernatants or 4 μg of purified protein samples were mixed with Bolt™ LDS Sample Buffer (Novex) with or without reduce reagents. The samples were heated at 70° C. for 3 min and then loaded to a NuPAGE™ 4-12% BisTris Gel (Invitrogen). The gel was run in NuPAGE™ MOPS SDS Running buffer (Invitrogen) at 200 Volts for 35 min and then stained with Coomassie.

### Example 4. Proteolytic Treatment

[0282] One μg of the protease, human MMP-2 (R&D systems), human MMP-9 (R&D systems), mouse MMP-2 (R&D systems), or mouse MMP-9 (R&D systems) was added to 50 μg of the precursor protein, and incubated at 37° C. overnight.

### Example 5. NK92 IL-12 Bioassay

[0283] NK92 is an IL-2 dependent Natural Killer (NK) cell derived from peripheral blood of a patient with non-Hodgkin's lymphoma. In the presence of IL-2 NK92 cells will secrete Interferon-g in response to IL-12. Serial dilutions of test articles are performed in 100 mL/well in 96 well tissue culture plates. NK92 cells are added at 40,000 cells/well in 100 mL medium containing 10 ng/mL IL-2. Cultures are incubated at 37° C. for 2 days, and supernatants are assayed for IFN-g by ELISA using commercially available reagents. Data are fitted with a four-parameter logistic (4PL) regression to give the EC₅₀ of the test articles.

### Example 6. HEK-Blue™ IL-12 Bioassay

[0284] ASKG129 is assayed for biological function using the HEK-Blue™ IL12 reporter cells line (InvivoGen, Cat. #hkb-il12). IL-12 exerts its biological effects by binding to the IL-12 receptor which is composed of a b1 and b2 chain. Binding of the receptor leads to activation of a signaling pathway involving TyK2 and JAK2 leading to phosphorylation of STAT4 and subsequent production of Interferon-g. HEK-Blue™ IL12 cells have stably introduced genes for the human IL-12 receptor and for the IL-12 signaling pathway. In addition, they express a STAT-4 inducible secreted alkaline phosphatase (SEAP) reportergene. Serial dilutions of test articles are performed in 96 well plates in 50 mL/well assay medium (RPMI 1640, 10% FBS, NEAA, Pyruvate, NEAA, b-mercaptoethanol). Subsequently 30,000 HEK-Blue™ IL12 reporter cell are added in 50 mL/well, and cultures are incubated overnight at 37° C. Twenty microliters of culture supernatant are transferred to a new plate and 180 mL Quanti-Blue™ (Invivogen, Cat. Rep-qb1) reagent is added to each well. After a 1-hour incubation at 37° C., absorbance is measured at 650 nm with a spectrophotometer. Data are fitted with a four-parameter logistic (4PL) regression to give the EC₅₀ of the sample.

### Example 7. Ex Vivo Cytokine Releasing Assay

### Materials and Reagents

[0285] The following reagents were used in the cytokine releasing assay to test the ex vivo biological activities of the IL-12 chimeric molecules:
[0286] a. PBMCs, which were isolated from buffy coat blood (BiolVT)
[0287] b. IFN-g coating antibody (cat #506502, Biolegend), IFN-g detection antibody-biotin (cat #502504, Biolegend), TNF-α coating antibody (cat #502802, Biolegend),
[0288] c. TNF-α detection antibody-biotin (cat #502904, Biolegend). Streptavidin-HRP Conjugate (Jackson Immunoresearch Laboratories, cat #016-030-084)
[0289] d. Pierce TMB substrates (Thermo Fisher Scientific, cat #34021)
[0290] e. ELISA washing buffer (0.05% Tween20 in PBS).

[0291] Procedures

### Cell Treatment

[0292] Cell treatment was carried out following the procedure listed below:
[0293] a. Seeding fresh isolated or frozen PBMC to 96 well tissue culture plate (400k each well).
[0294] b. Add designed IL-12 compounds and different concentration to PBMC well (starting con. 100 μg/ml, 1:4 fold dilution. final volume 200 ul in cell culture medium).
[0295] c. Culture cells for 72 hrs.
[0296] d. pin down plate and take supernatant for ELISA.

### ELISA Analysis

[0297] ELISA assay was carried out following the procedure listed below:
[0298] a. Coat the wells of the plate with the capture antibody at a concentration of 1 μg/ml in PBS (pH7.2).
[0299] b. Block the remaining protein-binding sites in the coated wells by adding 200 μl blocking buffer, 5% BSA/PBST, for at least 1-2 h at room temperature.
[0300] c. Add 100 μl of appropriately diluted samples to each well, and Incubate for 90-120 min at room temperature.
[0301] d. Add 100 μl of diluted detection antibody (0.5 ug/ml) to each well, and incubate for 1 h at room temperature.
[0302] e. Add 100 μl of Streptavidin-HRP Conjugate at 01 μg/ml and incubate for 1 hr. at room temperature.
   [0303] Between a-e each step be washed 4× with 200 ul washing buffer.
[0304] f. Mixing TMB substrates and dispense 100 μl of the substrate solution per well with a multichannel pipet.
[0305] g. Add 100 ul of 1 N H2SO4 to each well when the substrate color development
[0306] h. Read the plate with SpectramMax at 450 nm.

### Example 8. pSTAT4 Assay

### Materials and Reagents

[0307] The following reagents were used in the pSTAT4 assay to test the ex vivo biological activities of the IL-12 chimeric molecules:
[0308] a. RPMI 1640 w/L-glutamine (Life Technologies, 11875-093)
[0309] b. 10% Fetal Bovine Serum (Sciencell, #0500)
[0310] c. Non-Essential Amino Acids (100×) (Life Technologies, #11140-050)
[0311] d. Sodium Pyruvate (100×) (Life Technologies, #11360-070)
[0312] e. Penicillin/Streptomycin (Thermo-Fisher Scientific, 15070-063)
[0313] f. Beta-mercaptoethanol (1000×) (Life Technologies, #21985-023)
[0314] g. Human PBMC (Peripheral blood mononuclear cells) (BIOIVT #RR00744)
[0315] h. BD Cytofix fixation buffer (BD 554655), BD Phosflow Perm Buffer IV 10× (BD 560746)
[0316] i. Antibodies: PerCP/CY5.5-anti-CD3 (Biolegend 317446) APC-Cy7-anti-CD8 (Biolegend 344714),
[0317] j. FITC-anti-CD4 (Biolegend 300538), PE-anti-p-Stat4 (BD 562073),
[0318] k. BV605-anti-CD56 (Biolegend, 362538), BV421-anti-Lag3 (BD 565720)
[0319] l. Human Interleukin-12 (Prospec, #CYT-101 b

[0320] The procedure was in the pSTAT4 assay to test the ex vivo biological activities of the IL-12 chimeric molecules is described below:

[0321] Healthy human PBMC were isolated from human buffy coat with Ficoll-paque PLUS. Fresh Isolated or frozen PBMCs (60 million) were cultured with 10% FBS in RMPI 1640 complete medium in anti-CD3 (2.5 μg/ml) pre-coated 6-well plate with anti-CD28 (5 μg/ml) and IL-2 (5 ng/ml) for 48 hours.

[0322] Activated PBMCs were washed with RPMI 1640 medium and then resuspended in T cell culture medium for overnight culture. Rested PBMC were collected and stained with PerCP/CY5.5 anti-CD3, APC/Cy7-anti-CD8, FITC-anti-CD4, and BV605-anti-CD56 on ice for one-half hour. Anti-Lag3-IL-12 mutein (Lag3-129C) and control reference were serial diluted in 96-well plates and mixed with PBMCs (6×105/well), followed by incubation at 37° c. incubator for 15 minutes. Following cell treatment, an equal volume of warmed BD Cytofix fixation buffer (BD554655) was added to stop the reaction. Cells were washed with PBS, and permeabilized with Perm Buffer IV (0.5×) for 20 minutes. After washing, cells were resuspended in stain buffer with PE-anti-p-Stat4 and BV421-anti-Lag3. Cells were measured by BD flow cytometry (FACSCelesta, BD Biosciences).

### Example 9. Screening of p40 Subunit Mutations and p35 Subunit Mutations

[0323] Chimeric molecules which comprise mutant p40 subunit or mutant p35 subunit were expressed and their activities tested. The chimeric molecules comprise mutations and amino acid sequences as shown in FIG. 7B. A control molecule which comprises wild type IL-12 and another control molecule which does not comprises any masking moiety are also included. FIG. 7A shows the NK92 activity assay (Interferon gamma releasing) results.

[0324] The results showed that the Y40A mutation in the p35 subunit significantly reduced the activity of the chimeric molecule both prior to activation (an EC50 of 42 nM compared to the EC50 of 0.0042 nM for the wild type IL-12, a 10,000 fold reduction) and after activation (0.0160 nM vs 0.0003 nM, a 50 folder reduction). It was surprising that the change in activity prior to activation was much higher than that after activation, indicating the synergistic interaction between the masking effect and effect from the Y40A mutation. Several additional mutations also induced significant reduction in the activities of the chimeric molecules prior to and after activation, which include: (a) p35-F166K, a 7 folder reduction prior to activation, and a 10 folder reduction after activation; (b) p40-deletion, a 15 folder reduction prior to activation, and about an 8 folder reduction after activation; (c) p40-AA (K260A/R261A), a 10 folder reduction prior to activation, and a five folder reduction after activation; and (d) p35-T43A/S44G, an 8 folder reduction prior to activation, and a four folder reduction after activation. All those mutations are of potential applications when a lower potency or safer molecule is needed. Alternatively, those mutations may provide selectivity of the IL-12 chimeric molecules with certain subsets or subsets of immune cells.

[0325] Ex vivo biological activities of the chimeric molecules were also analyzed using Interferon-y releasing assay (FIGS. 10A and 10B). The results showed that both masking moieties significantly reduced the activity of IL-12 in this Interferon-γ releasing assay. In addition, p35-Y40A mutation further reduced the activities of the chimeric molecule with U mask.

### Example 10. Linker Screening for Chimeric Molecules Comprising Single Domain Antibodies which Bind to LAG-3

[0326] IL-12 chimeric molecules are complex molecules and aggregation formation was one of the main challenges for their productions. In order to design better molecules, the linkers in the chimeric molecules were tested. Chimeric molecules comprising single domain antibodies against LAG-3 were expressed and purified by Protein A affinity chromatography. The sequence information of the chimeric molecules is shown in Table 6. All the molecules comprise a general structure as illustrated in FIG. 8. The molecules have various length of the peptide linker linking the masking moiety to the C-terminus of one of the Fc polypeptides, GGGGSGGGGSAAGGGGSGGGGS, GGGGSGGGGSGGGGS, GGGGSGGGGS, and GGGGS. The peptide linker linking the p40 subunit to the other Fc polypeptide comprises GGGGSGGGGSGGGGS. And the peptide linker linking the p35 subunit to the p40 subunit also comprises GGGGSGGGGSGGGGS. In general, the SEC-HPLC main peak purities were low (<35%) (Table 6).

TABLE 6
SEC-HPLC Purity and Sequence Information of Chimeric Molecules with
Various Peptide Linkers Which Link The Masking Moiety to The Carrier

| ExpiCHO | | | | | |
|---|---|---|---|---|---|
| Expression | | | | Linker between | |
| Sample | | | | Masking Moiety | SEC-HPLC, |
| Name | Fc-cytokine | Fc-Mask | ratio | and Carrier | Main Peak % |
| JR11.159.1 | CX14.51.3 | CX14.51.1 | 1:1 | 2xG4SAA2xG4S | 34.93 |
| | SEQ ID NO: 124 | (SEQ ID NO: 115) | | | |
| JR11.159.2 | | CX14.72.1 | 1:1 | 3xG4S | 25.23 |
| | | (SEQ ID NO: 111) | | | |
| JR11.159.3 | | CX14.72.2 | 1:1 | 2xG4S | 28.04 |
| | | (SEQ ID NO: 112) | | | |
| JR11.159.4 | | CX14.72.3 | 1:1 | 1xG4S | 26.79 |
| | | (SEQ ID NO: 113) | | | |

[0327] In another attempt, the peptide linker linking the p35 subunit to the p40 subunit was shorter, comprising GGGGS, or GGGGSGGGGS. Surprisingly, the SEC-HPLC main peak purities were significantly higher, ranged from 47% to 54% (Table 7). To their surprise, the inventors of this invention discovered that the product purity can be improved significantly by reducing the length of the linker between the p40 subunit and the p35 subunit in the chimeric molecule.

TABLE 7
SEC-HPLC Purity and Sequence Information of Chimeric Molecules
with Shorter Peptide Linkers between p40 and p35

| | | | | Linker | | |
|---|---|---|---|---|---|---|
| | | | | Linking the | Linker | |
| Sample | Cytokine | Mask | | Mask to the | Connecting | SEC-HPLC |
| Name | Chain | Chain | ratio | Carrier | p35-p40 | Main Peak % |
| SR02.2.1 | CX14.74.1 | CX14.51.1 | 1:1 | 2xG4SAA2xG4S | 2xG4S | 51.48% |
| | SEQ ID | SEQ ID | | | | |
| | NO: 116 | NO: 115 | | | | |
| SR02.2.2 | CX14.74.2 | | 1:1 | | 1xG4S | 52.16% |
| | SEQ ID | | | | | |
| | NO: 117 | | | | | |
| SR02.2.3 | CX14.74.1 | CX14.72.4 | 1:1 | No linker | 2xG4S | 47.00% |
| | SEQ ID | SEQ ID | | | | |
| | NO: 116 | NO: 114 | | | | |
| SR02.2.4 | CX14.74.2 | | 1:1 | | 1xG4S | 51.23% |
| | SEQ ID | | | | | |
| | NO: 117 | | | | | |
| SR02.2.5 | CX14.74.1 | | 2:1 | | 2xG4S | 53.96% |
| | SEQ ID | | | | | |
| | NO: 116 | | | | | |

### Example 12. Bioassay Activity Characterization of Chimeric Molecules Comprising a Single Domain Antibody Against LAG-3

[0328] Several chimeric molecules comprising a single domain antibody against LAG-3, ASKG129A, ASKG129B and ASKG129C were expressed and purified (Table 5). The biological activities of those chimeric molecules were analyzed.

[0329] FIG. 11 shows the results of the HEK Blue-IL12 assay for the purified chimeric molecules ASKG129A, ASKG129B and ASKG129C. The data showed that all three molecules had significantly reduced biological activities as compared with IL-12. EC50 values of the molecules were over 200 times to 5000 times larger than IL-12. Notably, the masking moiety and the p35-Y40A mutation together significantly reduced the activities of IL-12. FIG. 12 shows the cytokine releasing assay with human PBMC. The activity of ASKG129C was reduced by approximately 1000 times as that of IL-12, which may make this chimeric molecule significantly safer for therapeutic applications.

[0330] FIGS. 13A-13F show the results of the ex vivo pSTAT4 analysis. Human recombinant IL-12 induced dose-dependent phosphorylation of STAT4 (p-STAT4) in human PBMC (EC50 values CD4⁺ T cells: 0.072 nM, CD8⁺ T cells: 0.045 nM, NK cells: 0.1662 nM), compared with Lag3-129C (or ASKG129C) (EC50 values CD4⁺ T cells: 2.52 nM, CD8⁺ T cells: 2.09 nM, NK cells: 3.75 nM). The E-max (Maximal response) for human IL-12-induced CD8⁺ T cells and NK cells was around 60 to 80% p-STAT4 positive cells vs 40 to 50% p-STAT4 positive CD4⁺ T cells. However, the Lag3-129C (or ASKG129C)-induced Emax response was much reduced in CD8⁺ T cells, NK cells, and CD4⁺ T cells (30%, 20%, and 10%) respectively. Consistent with the other two in vitro or ex vivo assays, the activity of Lag3-129C to induce activation of STAT4 was significantly reduced compared with human recombinant IL-12 in CD4⁺ T cells, CD8⁺ T cells and NK cells.

[0331] Surprisingly, further analysis showed that ASKG129C induced phosphorylation of STAT4 in the majority of Lag3⁺CD4⁺ and Lag3⁺CD8⁺ T cells and demonstrated significantly higher biological activities compared with the Lag3-CD4⁺ and Lag3-CD8W T cells. The inventor of this invention made a surprising discovery that the masked IL-12 polypeptide was able to activate cells expressing the antigen (in this case LAG3) targeted by the antigen-binding moiety in the carrier even though the masking moiety of the chimeric molecule was not cleaved or removed.

[0332] As a control, anti-Lag3 hIgG4 show no detectable ability to induce phosphorylation of STAT4 in the majority of immune cells (CD4⁺ T, CD8⁺ T cells, and NK cells).

### Example 13. Expression and Characterization of Chimeric Molecules Comprising An Antibody Against PD-1

[0333] Chimeric molecules comprising an anti-PD-1 antibody as their carrier were also expressed and purified. Table 8 shows the amino acid sequence information of the chimeric molecules. FIG. 14 shows the purity analysis of the chimeric molecules by reduced and non-reduced SDS-PAGE. FIG. 15 shows the HEK-Blue IL-12 Assay results for the chimeric molecule which comprises an anti-PD-1 antibody and an IL-12 mutant, wherein a mutant comprises p40-K260A/R261A mutations. The activity of a chimeric molecule was lower compared to the Fc-based IL-12 chimeric molecule which comprises the wild type IL-12 and is masked by the U mask. In addition, both molecules had lower activity compared to the reference molecule, which is an IL-12 mutant molecule fused to the Fc domain, which was disclosed in United States Patent Application 20200216509. The results showed that chimeric molecule comprising an anti-PD-1 antibody as the carrier can be expressed and purified, wherein a chimeric molecule further showed expected biological activity based on the reporter assay.

TABLE 8
Sequence Information of Chimeric Molecules Comprising
An Anti-PD-1 Antibody As the Carrier

| | | | | | | | Plasmid |
|---|---|---|---|---|---|---|---|
| Molecule | Chain 1 | | Chain 2 | | Chain 3 | | ratio |
| SR2.7.1 | CX14.77.1 | SEQ ID | CX14.77.4 | SEQ ID | CX11.135.1 | SEQ ID | 2:1:3 |
| SR2.7.2 | | NO: 125 | | NO: 128 | | NO: 129 | 1:1:2 |
| SR2.7.3 | CX14.77.3 | SEQ ID | | | | | 2:1:3 |
| SR2.7.4 | | NO: 127 | | | | | 1:1:2 |

[0334] The above non-limiting examples are provided for illustrative purposes only in order to facilitate a more complete understanding of the disclosed subject matter. These examples should not be construed to limit any of the embodiments described in the present specification, including those pertaining to the antibodies, pharmaceutical compositions, or methods and uses for treating cancer, a neurodegenerative or an infectious disease.

[0335] It is understood that although aspects of the present specification are highlighted by referring to specific embodiments, one skilled in the art will readily appreciate that these disclosed embodiments are only illustrative of the principles of the subject matter disclosed herein. Therefore, it should be understood that the disclosed subject matter is not intended to be limited to a particular compound, composition, article, or method, unless expressly stated as such. In addition, those of ordinary skill in the art will recognize that certain changes, modification, permutations, alterations, additions, subtractions, and sub-combinations thereof can be made in accordance with the teachings herein without departing from the spirit of the present specification.

[0336] Unless otherwise defined herein, scientific and technical terms used in connection with the present disclosure shall have the meanings that are commonly understood by those of ordinary skill in the art. Exemplary methods and materials are described below, although methods and materials similar or equivalent to those described herein can also be used in the practice or testing of the present disclosure. In case of conflict, the present specification, including definitions, will control. Generally, nomenclature used in connection with, and techniques of, cell and tissue culture, molecular biology, immunology, microbiology, genetics, analytical chemistry, synthetic organic chemistry, medicinal and pharmaceutical chemistry, and protein and nucleic acid chemistry and hybridization described herein are those well-known and commonly used in the art. Enzymatic reactions and purification techniques are performed according to manufacturer's specifications, as commonly accomplished in the art or as described herein. Further, unless otherwise required by context, singular terms shall include pluralities and plural terms shall include the singular. Throughout this specification and embodiments, the words “have” and “comprise,” or variations such as “has,” “having,” “comprises,” or “comprising,” will be understood to imply the inclusion of a stated integer or group of integers but not the exclusion of any other integer or group of integers. It is understood that aspects and variations of the invention described herein include “consisting” and/or “consisting essentially of” aspects and variations. All publications and other references mentioned herein are incorporated by reference in their entirety. Although a number of documents are cited herein, this citation does not constitute an admission that any of these documents forms part of the common general knowledge in the art.

1. A chimeric molecule, which comprises an IL-12 p40 subunit (p40), an IL-12 p35 subunit (p35), a masking moiety (MM), and a carrier (C); wherein:
(a) said IL-12 subunit p40 comprises an amino acid sequence of SEQ ID NO: 5 or an amino acid sequence with at least 95% identity to that of SEQ ID NO: 5;
(b) said IL-12 subunit p35 comprises an amino acid sequence of SEQ ID NO: 6 or an amino acid sequence with at least 95% identity to that of SEQ ID NO: 6;
(c) said masking moiety comprises an amino acid sequence of SEQ ID NOS: 1, 2, 3 or 4 or an amino acid sequence with at least 95% identity to that of SEQ ID NO: 1, 2, 3 or 4;
(d) said carrier is selected from an albumin, an albumin fragment, an Fc domain, and an antibody; and
(e) said IL-12 p40 subunit comprises one or more mutations at one or more sites selected from the following: Lys258, Ser259, Lys260, Arg261, Lys263, Lys264, Asp265, and Arg266 (numbering according to SEQ ID NO: 5).

2. A chimeric molecule, which comprises an IL-12 p40 subunit (p40), an IL-12 p35 subunit (p35), a masking moiety (MM), and a carrier (C); wherein:
(a) said IL-12 subunit p40 comprises an amino acid sequence of SEQ ID NO: 5, or an amino acid sequence with at least 95% identity to that of SEQ ID NO: 5;
(b) said IL-12 subunit p35 comprises an amino acid sequence of SEQ ID NO: 6, or an amino acid sequence with at least 95% identity to that of SEQ ID NO: 6;
(c) said masking moiety comprises an amino acid sequence of SEQ ID NO: 1, 2, 3 or 4, or an amino acid sequence with at least 95% identity to that of SEQ ID NO: 1, 2, 3 or 4;
(d) said carrier is selected from an albumin, an albumin fragment, an Fc domain, and an antibody; and
(e) said IL-12 p40 subunit comprises mutations Lys260Ala and Arg261Ala.

3. A chimeric molecule, which comprises an IL-12 p40 subunit (p40), an IL-12 p35 subunit (p35), a masking moiety (MM), and a carrier (C); wherein:
(a) said IL-12 subunit p40 comprises an amino acid sequence of SEQ ID NO: 46, 63, or 98, or an amino acid sequence with at least 99% identity to that of SEQ ID NO: 46, 63, or 98;
(b) said IL-12 subunit p35 comprises an amino acid sequence of SEQ ID NO: 6 or an amino acid sequence with at least 95% identity to that of SEQ ID NO: 6;
(c) said masking moiety comprises an amino acid sequence of SEQ ID NO: 1, 2, 3 or 4 or an amino acid sequence with at least 95% identity to that of SEQ ID NO: 1, 2, 3 or 4; and
(d) said carrier is selected from an albumin or albumin fragment, an Fc domain, and an antibody.

4. The chimeric molecule of claim 1, wherein:
(a) said masking moiety is linked to the carrier through a cleavable peptide linker, or a non-peptide cleavable linker;
(b) said p40 subunit is fused to the carrier through a non-cleavable linker; and
said p35 subunit is fused to the p40 subunit through a non-cleavable linker.

5.-18. (canceled)

19. The chimeric molecule of claim 1, wherein the carrier comprises an antigen binding moiety, which binds to an antigen expressed on the surfaced of a tumor cell, a cancer cell, or an immune cell; wherein said antigen is selected from PD-1, PD-L1, CD47, CD16a, NKG2D, NKG2A, SIRPα, Siglec-10, TIGIT, TIM-3, LAG-3, 5T4, FAP, EGFR, CMET, HER2, Trop-2, VEGFR2, ROR1, mesothelin, GPC-3, CD20, CD38, and BCMA.

20.-27. (canceled)

28. A chimeric molecule, which comprises an IL-12 p40 subunit (p40), an IL-12 p35 subunit (p35), a masking moiety (MM), and a carrier (C); wherein:
(a) said IL-12 subunit p40 comprising an amino acid sequence of SEQ ID NO: 5 or an amino acid sequence of at least 95% identity to that of SEQ ID NO: 5;
(b) said IL-12 subunit p35 comprising an amino acid sequence of SEQ ID NO: 6 or an amino acid sequence of at least 95% identity to that of SEQ ID NO: 6;
(c) said masking moiety comprises an amino acid sequence of SEQ ID NOS: 1, 2, 3 or 4, or an amino acid sequence of at least 95% identity to that of SEQ ID NO: 1, 2, 3 or 4;
(d) said carrier comprises an antigen-binding moiety which binds to PD-1 and an Fc domain with a first Fc polypeptide and a second Fc polypeptide;
(e) said masking moiety if fused to the C-terminus of the first Fc polypeptide with or without a non-cleavable or cleavable peptide linker; wherein said peptide linker optionally comprises an amino acid sequence of 3 amino acids to 22 amino acids in length;
(f) said p40 subunit is fused to the 2^{nd} Fc polypeptide optionally through a non-cleavable peptide linker;
(g) said p35 subunit is fused to the C-terminus of the p40 subunit optionally through a peptide linker
wherein said chimeric molecule has higher activity stimulating a PD-1 positive (or PD-1⁺) T cell compared to that of stimulating an NK cell.

29.-31. (canceled)

32. The chimeric molecule of claim 28 which comprises two polypeptide chains; wherein said first polypeptide chain comprises an amino acid sequence selected from SEQ ID NOs: 103-108 or an amino acid sequence of at least 99% identity to one of SEQ ID NOs: 103-108; and wherein said second polypeptide chain comprises an amino acid sequence selected from SEQ ID NOs: 109 and 110 or an amino acid sequence of at least 99% identity to one of SEQ ID NOs: 109 or 110.

33. The chimeric molecule of any of claim 28 which comprises two identical light chains and a first heavy chain polypeptide chain and a second heavy chain polypeptide chain; wherein said light chains comprise an amino acid sequence of SEQ ID NO: 129 or an amino acid sequence of at least 95% identity to SEQ ID NO: 129; wherein said first heavy chain polypeptide chain comprises an amino acid sequence selected from SEQ ID NOs: 125-127 or an amino acid sequence of at least 99% identity to SEQ ID NOs: 125-127; and wherein said second heavy chain polypeptide chain comprises an amino acid sequence as SEQ ID NO: 128 or an amino acid sequence of at least 99% identity to SEQ ID NO: 128.

34. The chimeric molecule of any of claim 28 which comprises two identical light chains and a first heavy chain polypeptide chain, and a second heavy chain polypeptide chain; wherein said light chains comprise an amino acid sequence of SEQ ID NO: 129 or an amino acid sequence of at least 95% identity to SEQ ID NO: 129; wherein said first heavy chain polypeptide chain comprises an amino acid sequence selected from SEQ ID NOs: 130-135 or an amino acid sequence of at least 99% identity to one of SEQ ID NOs: 130-135; and further wherein said second heavy chain polypeptide chain comprises an amino acid sequence of SEQ ID NO: 136 or an amino acid sequence of at least 99% identity to one of SEQ ID NO: 136.

35.-37. (canceled)

38. A pharmaceutical composition comprising the chimeric molecule of claim 28 as its active ingredient and a pharmaceutically acceptable excipient.

39.-47. (canceled)

48. The chimeric molecule of claim 2, wherein:
(a) said masking moiety is linked to the carrier through a cleavable peptide linker, or a non-peptide cleavable linker;
(b) said p40 subunit is fused to the carrier through a non-cleavable linker; and
said p35 subunit is fused to the p40 subunit through a non-cleavable linker.

49. The chimeric molecule of claim 3, wherein:
(a) said masking moiety is linked to the carrier through a cleavable peptide linker, or a non-peptide cleavable linker;
(b) said p40 subunit is fused to the carrier through a non-cleavable linker; and
said p35 subunit is fused to the p40 subunit through a non-cleavable linker.

50. The chimeric molecule of claim 2, wherein the carrier comprises an antigen binding moiety, which binds to an antigen expressed on the surfaced of a tumor cell, a cancer cell, or an immune cell; wherein said antigen is selected from PD-1, PD-L1, CD47, CD16a, NKG2D, NKG2A, SIRPα, Siglec-10, TIGIT, TIM-3, LAG-3, 5T4, FAP, EGFR, CMET, HER2, Trop-2, VEGFR2, ROR1, mesothelin, GPC-3, CD20, CD38, and BCMA.

51. The chimeric molecule of claim 3, wherein the carrier comprises an antigen binding moiety, which binds to an antigen expressed on the surfaced of a tumor cell, a cancer cell, or an immune cell; wherein said antigen is selected from PD-1, PD-L1, CD47, CD16a, NKG2D, NKG2A, SIRPα, Siglec-10, TIGIT, TIM-3, LAG-3, 5T4, FAP, EGFR, CMET, HER2, Trop-2, VEGFR2, ROR1, mesothelin, GPC-3, CD20, CD38, and BCMA.

The application's sequence listing, which the Patent Office published only in electronic form, follows.

SEQUENCE LISTING (137 sequences)

SEQ ID NO: 1 - protein, 241 aa, artificial
  VL-VH scFv derived from Ustekinumab
DIQMTQSPSSLSASVGDRVTITCRASQGISSWLAWYQQKPEKAPKSLIYAASSLQSGVPSRFSGSGSGTDFTLTISSLQPEDFATYYCQQYNIYPYTFGQGTKLEIKGGGGSGGGGSGGGGSEVQLVQSGAEVKKPGESLKISCKGSGYSFTTYWLGWVRQMPGKGLDWIGIMSPVDSDIRYSPSFQGQVTMSVDKSITTAYLQWNSLKASDTAMYYCARRRPGQGYFDFWGQGTLVTVSS

SEQ ID NO: 2 - protein, 241 aa, artificial
  VH-VL scFv derived from Ustekinumab
EVQLVQSGAEVKKPGESLKISCKGSGYSFTTYWLGWVRQMPGKGLDWIGIMSPVDSDIRYSPSFQGQVTMSVDKSITTAYLQWNSLKASDTAMYYCARRRPGQGYFDFWGQGTLVTVSSGGGGSGGGGSGGGGSDIQMTQSPSSLSASVGDRVTITCRASQGISSWLAWYQQKPEKAPKSLIYAASSLQSGVPSRFSGSGSGTDFTLTISSLQPEDFATYYCQQYNIYPYTFGQGTKLEIK

SEQ ID NO: 3 - protein, 241 aa, artificial
  VL-VH scFv derived from Briakinnumab
QSVLTQPPSVSGAPGQRVTISCSGSRSNIGSNTVKWYQQLPGTAPKLLIYYNDQRPSGVPDRFSGSKSGTSASLAITGLQAEDEADYYCQSYDRYTHPALLFGTGTKVTVLGGGGSGGGGSGGGGSQVQLVESGGGVVQPGRSLRLSCAASGFTFSSYGMHWVRQAPGKGLEWVAFIRYDGSNKYYADSVKGRFTISRDNSKNTLYLQMNSLRAEDTAVYYCKTHGSHDNWGQGTMVTVSS

SEQ ID NO: 4 - protein, 241 aa, artificial
  VH-VL scFv derived from Briakinnumab
QVQLVESGGGVVQPGRSLRLSCAASGFTFSSYGMHWVRQAPGKGLEWVAFIRYDGSNKYYADSVKGRFTISRDNSKNTLYLQMNSLRAEDTAVYYCKTHGSHDNWGQGTMVTVSSGGGGSGGGGSGGGGSQSVLTQPPSVSGAPGQRVTISCSGSRSNIGSNTVKWYQQLPGTAPKLLIYYNDQRPSGVPDRFSGSKSGTSASLAITGLQAEDEADYYCQSYDRYTHPALLFGTGTKVTVL

SEQ ID NO: 5 - protein, 306 aa, artificial
  P40 subunit of IL-12
IWELKKDVYVVELDWYPDAPGEMVVLTCDTPEEDGITWTLDQSSEVLGSGKTLTIQVKEFGDAGQYTCHKGGEVLSHSLLLLHKKEDGIWSTDILKDQKEPKNKTFLRCEAKNYSGRFTCWWLTTISTDLTFSVKSSRGSSDPQGVTCGAATLSAERVRGDNKEYEYSVECQEDSACPAAEESLPIEVMVDAVHKLKYENYTSSFFIRDIIKPDPPKNLQLKPLKNSRQVEVSWEYPDTWSTPHSYFSLTFCVQVQGKSKREKKDRVFTDKTSATVICRKNASISVRAQDRYYSSSWSEWASVPCS

SEQ ID NO: 6 - protein, 197 aa, artificial
  P35 subunit of IL-12
RNLPVATPDPGMFPCLHHSQNLLRAVSNMLQKARQTLEFYPCTSEEIDHEDITKDKTSTVEACLPLELTKNESCLNSRETSFITNGSCLASRKTSFMMALCLSSIYEDLKMYQVEFKTMNAKLLMDPKRQIFLDQNMLAVIDELMQALNFNSETVPQKSSLEEPDFYKTKIKLCILLHAFRIRAVTIDRVMSYLNAS

SEQ ID NO: 7 - protein, 146 aa, artificial
  CD40L ectodomain (aa 116-261)
GDQNPQIAAHVISEASSKTTSVLQWAEKGYYTMSNNLVTLENGKQLTVKRQGLYYIYAQVTFCSNREASSQAPFIASLCLKSPGRFERILLRAANTHSSAKPCGQQSIHLGGVFELQPGASVFVNVTDPSQVSHGTGFTSFGLLKL

SEQ ID NO: 8 - protein, 548 aa, artificial
  Fc - IL-12 P40 with knobs mutations
DKTHTCPPCPAPELLGGPSVFLFPPKPKDTLMISRTPEVTCVVVDVSHEDPEVKFNWYVDGVEVHNAKTKPREEQYASTYRVVSVLTVLHQDWLNGKEYKCKVSNKALPAPIEKTISKAKGQPREPQVYTLPPCRDELTKNQVSLWCLVKGFYPSDIAVEWESNGQPENNYKTTPPVLDSDGSFFLYSKLTVDKSRWQQGNVFSCSVMHEALHNHYTQKSLSLSPGAGGGGSGGGGSGGGGSIWELKKDVYVVELDWYPDAPGEMVVLTCDTPEEDGITWTLDQSSEVLGSGKTLTIQVKEFGDAGQYTCHKGGEVLSHSLLLLHKKEDGIWSTDILKDQKEPKNKTFLRCEAKNYSGRFTCWWLTTISTDLTFSVKSSRGSSDPQGVTCGAATLSAERVRGDNKEYEYSVECQEDSACPAAEESLPIEVMVDAVHKLKYENYTSSFFIRDIIKPDPPKNLQLKPLKNSRQVEVSWEYPDTWSTPHSYFSLTFCVQVQGKSKREKKDRVFTDKTSATVICRKNASISVRAQDRYYSSSWSEWASVPCS

SEQ ID NO: 9 - protein, 548 aa, artificial
  IL-12 P40-Fc with knobs mutations
IWELKKDVYVVELDWYPDAPGEMVVLTCDTPEEDGITWTLDQSSEVLGSGKTLTIQVKEFGDAGQYTCHKGGEVLSHSLLLLHKKEDGIWSTDILKDQKEPKNKTFLRCEAKNYSGRFTCWWLTTISTDLTFSVKSSRGSSDPQGVTCGAATLSAERVRGDNKEYEYSVECQEDSACPAAEESLPIEVMVDAVHKLKYENYTSSFFIRDIIKPDPPKNLQLKPLKNSRQVEVSWEYPDTWSTPHSYFSLTFCVQVQGKSKREKKDRVFTDKTSATVICRKNASISVRAQDRYYSSSWSEWASVPCSGGGGSGGGGSGGGGSDKTHTCPPCPAPELLGGPSVFLFPPKPKDTLMISRTPEVTCVVVDVSHEDPEVKFNWYVDGVEVHNAKTKPREEQYASTYRVVSVLTVLHQDWLNGKEYKCKVSNKALPAPIEKTISKAKGQPREPQVYTLPPCRDELTKNQVSLWCLVKGFYPSDIAVEWESNGQPENNYKTTPPVLDSDGSFFLYSKLTVDKSRWQQGNVFSCSVMHEALHNHYTQKSLSLSPGK

SEQ ID NO: 10 - protein, 760 aa, artificial
  Fc - IL-12 (P40-P35) with knobs mutations
DKTHTCPPCPAPELLGGPSVFLFPPKPKDTLMISRTPEVTCVVVDVSHEDPEVKFNWYVDGVEVHNAKTKPREEQYASTYRVVSVLTVLHQDWLNGKEYKCKVSNKALPAPIEKTISKAKGQPREPQVYTLPPCRDELTKNQVSLWCLVKGFYPSDIAVEWESNGQPENNYKTTPPVLDSDGSFFLYSKLTVDKSRWQQGNVFSCSVMHEALHNHYTQKSLSLSPGAGGGGSGGGGSGGGGSIWELKKDVYVVELDWYPDAPGEMVVLTCDTPEEDGITWTLDQSSEVLGSGKTLTIQVKEFGDAGQYTCHKGGEVLSHSLLLLHKKEDGIWSTDILKDQKEPKNKTFLRCEAKNYSGRFTCWWLTTISTDLTFSVKSSRGSSDPQGVTCGAATLSAERVRGDNKEYEYSVECQEDSACPAAEESLPIEVMVDAVHKLKYENYTSSFFIRDIIKPDPPKNLQLKPLKNSRQVEVSWEYPDTWSTPHSYFSLTFCVQVQGKSKREKKDRVFTDKTSATVICRKNASISVRAQDRYYSSSWSEWASVPCSGGGGSGGGGSGGGGSRNLPVATPDPGMFPCLHHSQNLLRAVSNMLQKARQTLEFYPCTSEEIDHEDITKDKTSTVEACLPLELTKNESCLNSRETSFITNGSCLASRKTSFMMALCLSSIYEDLKMYQVEFKTMNAKLLMDPKRQIFLDQNMLAVIDELMQALNFNSETVPQKSSLEEPDFYKTKIKLCILLHAFRIRAVTIDRVMSYLNAS

SEQ ID NO: 11 - protein, 921 aa, artificial
  CD40L - Fc - IL-12 (P40-P35) with knobs mutations
  variant (1)..(161): n = 1, 2 or 3
GDQNPQIAAHVISEASSKTTSVLQWAEKGYYTMSNNLVTLENGKQLTVKRQGLYYIYAQVTFCSNREASSQAPFIASLCLKSPGRFERILLRAANTHSSAKPCGQQSIHLGGVFELQPGASVFVNVTDPSQVSHGTGFTSFGLLKLGGGGSGGGGSGGGGSDKTHTCPPCPAPELLGGPSVFLFPPKPKDTLMISRTPEVTCVVVDVSHEDPEVKFNWYVDGVEVHNAKTKPREEQYASTYRVVSVLTVLHQDWLNGKEYKCKVSNKALPAPIEKTISKAKGQPREPQVYTLPPCRDELTKNQVSLWCLVKGFYPSDIAVEWESNGQPENNYKTTPPVLDSDGSFFLYSKLTVDKSRWQQGNVFSCSVMHEALHNHYTQKSLSLSPGAGGGGSGGGGSGGGGSIWELKKDVYVVELDWYPDAPGEMVVLTCDTPEEDGITWTLDQSSEVLGSGKTLTIQVKEFGDAGQYTCHKGGEVLSHSLLLLHKKEDGIWSTDILKDQKEPKNKTFLRCEAKNYSGRFTCWWLTTISTDLTFSVKSSRGSSDPQGVTCGAATLSAERVRGDNKEYEYSVECQEDSACPAAEESLPIEVMVDAVHKLKYENYTSSFFIRDIIKPDPPKNLQLKPLKNSRQVEVSWEYPDTWSTPHSYFSLTFCVQVQGKSKREKKDRVFTDKTSATVICRKNASISVRAQDRYYSSSWSEWASVPCSGGGGSGGGGSGGGGSRNLPVATPDPGMFPCLHHSQNLLRAVSNMLQKARQTLEFYPCTSEEIDHEDITKDKTSTVEACLPLELTKNESCLNSRETSFITNGSCLASRKTSFMMALCLSSIYEDLKMYQVEFKTMNAKLLMDPKRQIFLDQNMLAVIDELMQALNFNSETVPQKSSLEEPDFYKTKIKLCILLHAFRIRAVTIDRVMSYLNAS

SEQ ID NO: 12 - protein, 921 aa, artificial
  IL-12 (P40-P35) - Fc - CD40L with knobs mutations
  variant (761)..(921): sequence from positions 761 to 921 may be absent or present in 1-3 copies (n=0, 1, 2 or 3)
IWELKKDVYVVELDWYPDAPGEMVVLTCDTPEEDGITWTLDQSSEVLGSGKTLTIQVKEFGDAGQYTCHKGGEVLSHSLLLLHKKEDGIWSTDILKDQKEPKNKTFLRCEAKNYSGRFTCWWLTTISTDLTFSVKSSRGSSDPQGVTCGAATLSAERVRGDNKEYEYSVECQEDSACPAAEESLPIEVMVDAVHKLKYENYTSSFFIRDIIKPDPPKNLQLKPLKNSRQVEVSWEYPDTWSTPHSYFSLTFCVQVQGKSKREKKDRVFTDKTSATVICRKNASISVRAQDRYYSSSWSEWASVPCSGGGGSGGGGSGGGGSRNLPVATPDPGMFPCLHHSQNLLRAVSNMLQKARQTLEFYPCTSEEIDHEDITKDKTSTVEACLPLELTKNESCLNSRETSFITNGSCLASRKTSFMMALCLSSIYEDLKMYQVEFKTMNAKLLMDPKRQIFLDQNMLAVIDELMQALNFNSETVPQKSSLEEPDFYKTKIKLCILLHAFRIRAVTIDRVMSYLNASGGGGSGGGGSGGGGSDKTHTCPPCPAPELLGGPSVFLFPPKPKDTLMISRTPEVTCVVVDVSHEDPEVKFNWYVDGVEVHNAKTKPREEQYASTYRVVSVLTVLHQDWLNGKEYKCKVSNKALPAPIEKTISKAKGQPREPQVYTLPPCRDELTKNQVSLWCLVKGFYPSDIAVEWESNGQPENNYKTTPPVLDSDGSFFLYSKLTVDKSRWQQGNVFSCSVMHEALHNHYTQKSLSLSPGAGGGGSGGGGSGGGGSGDQNPQIAAHVISEASSKTTSVLQWAEKGYYTMSNNLVTLENGKQLTVKRQGLYYIYAQVTFCSNREASSQAPFIASLCLKSPGRFERILLRAANTHSSAKPCGQQSIHLGGVFELQPGASVFVNVTDPSQVSHGTGFTSFGLLKL

SEQ ID NO: 13 - protein, 770 aa, artificial
  Fc- scFV which binds to IL-12-VL-VH Ustekinumab-Briakinnumab [ASKGD111_CX10__1]
MGVKVLFALICIAVAEADKTHTCPPCPAPELLGGPSVFLFPPKPKDTLMISRTPEVTCVVVDVSHEDPEVKFNWYVDGVEVHNAKTKPREEQYNSTYRVVSVLTVLHQDWLNGKEYKCKVSNKALPAPIEKTISKAKGQPREPQVCTLPPSRDELTKNQVSLSCAVKGFYPSDIAVEWESNGQPENNYKTTPPVLDSDGSFFLVSKLTVDKSRWQQGNVFSCSVMHEALHNHYTQKSLSLSPGKGGGGSGGGGSAAGGGGSGGGGSDIQMTQSPSSLSASVGDRVTITCRASQGISSWLAWYQQKPEKAPKSLIYAASSLQSGVPSRFSGSGSGTDFTLTISSLQPEDFATYYCQQYNIYPYTFGQGTKLEIKGGGGSGGGGSGGGGSEVQLVQSGAEVKKPGESLKISCKGSGYSFTTYWLGWVRQMPGKGLDWIGIMSPVDSDIRYSPSFQGQVTMSVDKSITTAYLQWNSLKASDTAMYYCARRRPGQGYFDFWGQGTLVTVSSGGGGSGGGGSAAGGGGSGGGGSQSVLTQPPSVSGAPGQRVTISCSGSRSNIGSNTVKWYQQLPGTAPKLLIYYNDQRPSGVPDRFSGSKSGTSASLAITGLQAEDEADYYCQSYDRYTHPALLFGTGTKVTVLGGGGSGGGGSGGGGSQVQLVESGGGVVQPGRSLRLSCAASGFTFSSYGMHWVRQAPGKGLEWVAFIRYDGSNKYYADSVKGRFTISRDNSKNTLYLQMNSLRAEDTAVYYCKTHGSHDNWGQGTMVTVSS

SEQ ID NO: 14 - protein, 753 aa, artificial
  Fc-scFV which binds to IL-12-VL-VH Briakinnumab- Ustekinumab
DKTHTCPPCPAPELLGGPSVFLFPPKPKDTLMISRTPEVTCVVVDVSHEDPEVKFNWYVDGVEVHNAKTKPREEQYNSTYRVVSVLTVLHQDWLNGKEYKCKVSNKALPAPIEKTISKAKGQPREPQVCTLPPSRDELTKNQVSLSCAVKGFYPSDIAVEWESNGQPENNYKTTPPVLDSDGSFFLVSKLTVDKSRWQQGNVFSCSVMHEALHNHYTQKSLSLSPGKGGGGSGGGGSAAGGGGSGGGGSQSVLTQPPSVSGAPGQRVTISCSGSRSNIGSNTVKWYQQLPGTAPKLLIYYNDQRPSGVPDRFSGSKSGTSASLAITGLQAEDEADYYCQSYDRYTHPALLFGTGTKVTVLGGGGSGGGGSGGGGSQVQLVESGGGVVQPGRSLRLSCAASGFTFSSYGMHWVRQAPGKGLEWVAFIRYDGSNKYYADSVKGRFTISRDNSKNTLYLQMNSLRAEDTAVYYCKTHGSHDNWGQGTMVTVSSGGGGSGGGGSAAGGGGSGGGGSDIQMTQSPSSLSASVGDRVTITCRASQGISSWLAWYQQKPEKAPKSLIYAASSLQSGVPSRFSGSGSGTDFTLTISSLQPEDFATYYCQQYNIYPYTFGQGTKLEIKGGGGSGGGGSGGGGSEVQLVQSGAEVKKPGESLKISCKGSGYSFTTYWLGWVRQMPGKGLDWIGIMSPVDSDIRYSPSFQGQVTMSVDKSITTAYLQWNSLKASDTAMYYCARRRPGQGYFDFWGQGTLVTVSS

SEQ ID NO: 15 - protein, 752 aa, artificial
  Fc - scFV which binds to IL-12-VL-VH Briakinnumab- Ustekinumab with cleavable linker
DKTHTCPPCPAPELLGGPSVFLFPPKPKDTLMISRTPEVTCVVVDVSHEDPEVKFNWYVDGVEVHNAKTKPREEQYNSTYRVVSVLTVLHQDWLNGKEYKCKVSNKALPAPIEKTISKAKGQPREPQVCTLPPSRDELTKNQVSLSCAVKGFYPSDIAVEWESNGQPENNYKTTPPVLDSDGSFFLVSKLTVDKSRWQQGNVFSCSVMHEALHNHYTQKSLSLSPGKGGGGSGGGGSAAGGGGSGGGGSQSVLTQPPSVSGAPGQRVTISCSGSRSNIGSNTVKWYQQLPGTAPKLLIYYNDQRPSGVPDRFSGSKSGTSASLAITGLQAEDEADYYCQSYDRYTHPALLFGTGTKVTVLGGGGSGGGGSGGGGSQVQLVESGGGVVQPGRSLRLSCAASGFTFSSYGMHWVRQAPGKGLEWVAFIRYDGSNKYYADSVKGRFTISRDNSKNTLYLQMNSLRAEDTAVYYCKTHGSHDNWGQGTMVTVSSGGGGSGGGGSGPLGVRGGGGSDIQMTQSPSSLSASVGDRVTITCRASQGISSWLAWYQQKPEKAPKSLIYAASSLQSGVPSRFSGSGSGTDFTLTISSLQPEDFATYYCQQYNIYPYTFGQGTKLEIKGGGGSGGGGSGGGGSEVQLVQSGAEVKKPGESLKISCKGSGYSFTTYWLGWVRQMPGKGLDWIGIMSPVDSDIRYSPSFQGQVTMSVDKSITTAYLQWNSLKASDTAMYYCARRRPGQGYFDFWGQGTLVTVSS

SEQ ID NO: 16 - protein, 914 aa, artificial
  CD40L - Fc - scFV which binds to IL-12-VL-VH Ustekinumab-Briakinnumab
  variant (1)..(161): sequence from positions 1 to 161 may be present in 1-3 copies (n=1, 2 or 3)
GDQNPQIAAHVISEASSKTTSVLQWAEKGYYTMSNNLVTLENGKQLTVKRQGLYYIYAQVTFCSNREASSQAPFIASLCLKSPGRFERILLRAANTHSSAKPCGQQSIHLGGVFELQPGASVFVNVTDPSQVSHGTGFTSFGLLKLGGGGSGGGGSGGGGSDKTHTCPPCPAPELLGGPSVFLFPPKPKDTLMISRTPEVTCVVVDVSHEDPEVKFNWYVDGVEVHNAKTKPREEQYNSTYRVVSVLTVLHQDWLNGKEYKCKVSNKALPAPIEKTISKAKGQPREPQVCTLPPSRDELTKNQVSLSCAVKGFYPSDIAVEWESNGQPENNYKTTPPVLDSDGSFFLVSKLTVDKSRWQQGNVFSCSVMHEALHNHYTQKSLSLSPGKGGGGSGGGGSAAGGGGSGGGGSDIQMTQSPSSLSASVGDRVTITCRASQGISSWLAWYQQKPEKAPKSLIYAASSLQSGVPSRFSGSGSGTDFTLTISSLQPEDFATYYCQQYNIYPYTFGQGTKLEIKGGGGSGGGGSGGGGSEVQLVQSGAEVKKPGESLKISCKGSGYSFTTYWLGWVRQMPGKGLDWIGIMSPVDSDIRYSPSFQGQVTMSVDKSITTAYLQWNSLKASDTAMYYCARRRPGQGYFDFWGQGTLVTVSSGGGGSGGGGSAAGGGGSGGGGSQSVLTQPPSVSGAPGQRVTISCSGSRSNIGSNTVKWYQQLPGTAPKLLIYYNDQRPSGVPDRFSGSKSGTSASLAITGLQAEDEADYYCQSYDRYTHPALLFGTGTKVTVLGGGGSGGGGSGGGGSQVQLVESGGGVVQPGRSLRLSCAASGFTFSSYGMHWVRQAPGKGLEWVAFIRYDGSNKYYADSVKGRFTISRDNSKNTLYLQMNSLRAEDTAVYYCKTHGSHDNWGQGTMVTVSS

SEQ ID NO: 17 - protein, 913 aa, artificial
  CD40L - Fc - scFV which binds to IL-12-VL-VH Briakinnumab- Ustekinumab with cleavable linker
  repeat (1)..(161): sequence from positions 1 to 161 may be present in 1-3 copies (n=1, 2 or 3)
GDQNPQIAAHVISEASSKTTSVLQWAEKGYYTMSNNLVTLENGKQLTVKRQGLYYIYAQVTFCSNREASSQAPFIASLCLKSPGRFERILLRAANTHSSAKPCGQQSIHLGGVFELQPGASVFVNVTDPSQVSHGTGFTSFGLLKLGGGGSGGGGSGGGGSDKTHTCPPCPAPELLGGPSVFLFPPKPKDTLMISRTPEVTCVVVDVSHEDPEVKFNWYVDGVEVHNAKTKPREEQYNSTYRVVSVLTVLHQDWLNGKEYKCKVSNKALPAPIEKTISKAKGQPREPQVCTLPPSRDELTKNQVSLSCAVKGFYPSDIAVEWESNGQPENNYKTTPPVLDSDGSFFLVSKLTVDKSRWQQGNVFSCSVMHEALHNHYTQKSLSLSPGKGGGGSGGGGSAAGGGGSGGGGSQSVLTQPPSVSGAPGQRVTISCSGSRSNIGSNTVKWYQQLPGTAPKLLIYYNDQRPSGVPDRFSGSKSGTSASLAITGLQAEDEADYYCQSYDRYTHPALLFGTGTKVTVLGGGGSGGGGSGGGGSQVQLVESGGGVVQPGRSLRLSCAASGFTFSSYGMHWVRQAPGKGLEWVAFIRYDGSNKYYADSVKGRFTISRDNSKNTLYLQMNSLRAEDTAVYYCKTHGSHDNWGQGTMVTVSSGGGGSGGGGSGPLGVRGGGGSDIQMTQSPSSLSASVGDRVTITCRASQGISSWLAWYQQKPEKAPKSLIYAASSLQSGVPSRFSGSGSGTDFTLTISSLQPEDFATYYCQQYNIYPYTFGQGTKLEIKGGGGSGGGGSGGGGSEVQLVQSGAEVKKPGESLKISCKGSGYSFTTYWLGWVRQMPGKGLDWIGIMSPVDSDIRYSPSFQGQVTMSVDKSITTAYLQWNSLKASDTAMYYCARRRPGQGYFDFWGQGTLVTVSS

SEQ ID NO: 18 - protein, 914 aa, artificial
  scFV which binds to IL-12-VL-VH Ustekinumab-Briakinnumab - Fc - CD40L
  variant (754)..(914): sequence from positions 754 to 914 may be absent or present in 1-3 copies (n=0, 1, 2 or 3)
DIQMTQSPSSLSASVGDRVTITCRASQGISSWLAWYQQKPEKAPKSLIYAASSLQSGVPSRFSGSGSGTDFTLTISSLQPEDFATYYCQQYNIYPYTFGQGTKLEIKGGGGSGGGGSGGGGSEVQLVQSGAEVKKPGESLKISCKGSGYSFTTYWLGWVRQMPGKGLDWIGIMSPVDSDIRYSPSFQGQVTMSVDKSITTAYLQWNSLKASDTAMYYCARRRPGQGYFDFWGQGTLVTVSSGGGGSGGGGSAAGGGGSGGGGSQSVLTQPPSVSGAPGQRVTISCSGSRSNIGSNTVKWYQQLPGTAPKLLIYYNDQRPSGVPDRFSGSKSGTSASLAITGLQAEDEADYYCQSYDRYTHPALLFGTGTKVTVLGGGGSGGGGSGGGGSQVQLVESGGGVVQPGRSLRLSCAASGFTFSSYGMHWVRQAPGKGLEWVAFIRYDGSNKYYADSVKGRFTISRDNSKNTLYLQMNSLRAEDTAVYYCKTHGSHDNWGQGTMVTVSSGGGGSGGGGSAAGGGGSGGGGSDKTHTCPPCPAPELLGGPSVFLFPPKPKDTLMISRTPEVTCVVVDVSHEDPEVKFNWYVDGVEVHNAKTKPREEQYNSTYRVVSVLTVLHQDWLNGKEYKCKVSNKALPAPIEKTISKAKGQPREPQVCTLPPSRDELTKNQVSLSCAVKGFYPSDIAVEWESNGQPENNYKTTPPVLDSDGSFFLVSKLTVDKSRWQQGNVFSCSVMHEALHNHYTQKSLSLSPGAGGGGSGGGGSGGGGSGDQNPQIAAHVISEASSKTTSVLQWAEKGYYTMSNNLVTLENGKQLTVKRQGLYYIYAQVTFCSNREASSQAPFIASLCLKSPGRFERILLRAANTHSSAKPCGQQSIHLGGVFELQPGASVFVNVTDPSQVSHGTGFTSFGLLKL

SEQ ID NO: 19 - protein, 913 aa, artificial
  scFV which binds to IL-12-VL-VH Ustekinumab-Briakinnumab - Fc - CD40L, with a cleavable linker
  repeat (753)..(913): sequence from positions 753 to 913 may be absent or present in 1-3 copies (n=0, 1, 2 or 3)
DIQMTQSPSSLSASVGDRVTITCRASQGISSWLAWYQQKPEKAPKSLIYAASSLQSGVPSRFSGSGSGTDFTLTISSLQPEDFATYYCQQYNIYPYTFGQGTKLEIKGGGGSGGGGSGGGGSEVQLVQSGAEVKKPGESLKISCKGSGYSFTTYWLGWVRQMPGKGLDWIGIMSPVDSDIRYSPSFQGQVTMSVDKSITTAYLQWNSLKASDTAMYYCARRRPGQGYFDFWGQGTLVTVSSGGGGSGGGGSGPLGVRGGGGSQSVLTQPPSVSGAPGQRVTISCSGSRSNIGSNTVKWYQQLPGTAPKLLIYYNDQRPSGVPDRFSGSKSGTSASLAITGLQAEDEADYYCQSYDRYTHPALLFGTGTKVTVLGGGGSGGGGSGGGGSQVQLVESGGGVVQPGRSLRLSCAASGFTFSSYGMHWVRQAPGKGLEWVAFIRYDGSNKYYADSVKGRFTISRDNSKNTLYLQMNSLRAEDTAVYYCKTHGSHDNWGQGTMVTVSSGGGGSGGGGSAAGGGGSGGGGSDKTHTCPPCPAPELLGGPSVFLFPPKPKDTLMISRTPEVTCVVVDVSHEDPEVKFNWYVDGVEVHNAKTKPREEQYNSTYRVVSVLTVLHQDWLNGKEYKCKVSNKALPAPIEKTISKAKGQPREPQVCTLPPSRDELTKNQVSLSCAVKGFYPSDIAVEWESNGQPENNYKTTPPVLDSDGSFFLVSKLTVDKSRWQQGNVFSCSVMHEALHNHYTQKSLSLSPGAGGGGSGGGGSGGGGSGDQNPQIAAHVISEASSKTTSVLQWAEKGYYTMSNNLVTLENGKQLTVKRQGLYYIYAQVTFCSNREASSQAPFIASLCLKSPGRFERILLRAANTHSSAKPCGQQSIHLGGVFELQPGASVFVNVTDPSQVSHGTGFTSFGLLKL

SEQ ID NO: 20 - protein, 914 aa, artificial
  scFV which binds to IL-12-VL-VH Briakinnumab - Ustekinumab - Fc - CD40L
  repeat (753)..(914): sequence from positions 753 to 914 may be absent or present in 1-3 copies (n=0, 1, 2 or 3)
QSVLTQPPSVSGAPGQRVTISCSGSRSNIGSNTVKWYQQLPGTAPKLLIYYNDQRPSGVPDRFSGSKSGTSASLAITGLQAEDEADYYCQSYDRYTHPALLFGTGTKVTVLGGGGSGGGGSGGGGSQVQLVESGGGVVQPGRSLRLSCAASGFTFSSYGMHWVRQAPGKGLEWVAFIRYDGSNKYYADSVKGRFTISRDNSKNTLYLQMNSLRAEDTAVYYCKTHGSHDNWGQGTMVTVSSGGGGSGGGGSAAGGGGSGGGGSDIQMTQSPSSLSASVGDRVTITCRASQGISSWLAWYQQKPEKAPKSLIYAASSLQSGVPSRFSGSGSGTDFTLTISSLQPEDFATYYCQQYNIYPYTFGQGTKLEIKGGGGSGGGGSGGGGSEVQLVQSGAEVKKPGESLKISCKGSGYSFTTYWLGWVRQMPGKGLDWIGIMSPVDSDIRYSPSFQGQVTMSVDKSITTAYLQWNSLKASDTAMYYCARRRPGQGYFDFWGQGTLVTVSSGGGGSGGGGSAAGGGGSGGGGSDKTHTCPPCPAPELLGGPSVFLFPPKPKDTLMISRTPEVTCVVVDVSHEDPEVKFNWYVDGVEVHNAKTKPREEQYNSTYRVVSVLTVLHQDWLNGKEYKCKVSNKALPAPIEKTISKAKGQPREPQVCTLPPSRDELTKNQVSLSCAVKGFYPSDIAVEWESNGQPENNYKTTPPVLDSDGSFFLVSKLTVDKSRWQQGNVFSCSVMHEALHNHYTQKSLSLSPGAGGGGSGGGGSGGGGSGDQNPQIAAHVISEASSKTTSVLQWAEKGYYTMSNNLVTLENGKQLTVKRQGLYYIYAQVTFCSNREASSQAPFIASLCLKSPGRFERILLRAANTHSSAKPCGQQSIHLGGVFELQPGASVFVNVTDPSQVSHGTGFTSFGLLKL

SEQ ID NO: 21 - protein, 860 aa, artificial
  SIRP alpha ECD - Fc - IL-12 (P40-P35) with knobs mutations
  variant (1)..(100): sequence from positions 1 to 100 may be present in 1-3 copies (n=1, 2 or 3)
EEELQVIQPDKSVLVAAGETATLRCTATSLIPVGPIQWFRGAGPGRELIYNQKEGHFPRVTTVSDLTKRNNMDFSIRIGNITPADGGGGSGGGGSGGGGSDKTHTCPPCPAPELLGGPSVFLFPPKPKDTLMISRTPEVTCVVVDVSHEDPEVKFNWYVDGVEVHNAKTKPREEQYASTYRVVSVLTVLHQDWLNGKEYKCKVSNKALPAPIEKTISKAKGQPREPQVYTLPPCRDELTKNQVSLWCLVKGFYPSDIAVEWESNGQPENNYKTTPPVLDSDGSFFLYSKLTVDKSRWQQGNVFSCSVMHEALHNHYTQKSLSLSPGAGGGGSGGGGSGGGGSIWELKKDVYVVELDWYPDAPGEMVVLTCDTPEEDGITWTLDQSSEVLGSGKTLTIQVKEFGDAGQYTCHKGGEVLSHSLLLLHKKEDGIWSTDILKDQKEPKNKTFLRCEAKNYSGRFTCWWLTTISTDLTFSVKSSRGSSDPQGVTCGAATLSAERVRGDNKEYEYSVECQEDSACPAAEESLPIEVMVDAVHKLKYENYTSSFFIRDIIKPDPPKNLQLKPLKNSRQVEVSWEYPDTWSTPHSYFSLTFCVQVQGKSKREKKDRVFTDKTSATVICRKNASISVRAQDRYYSSSWSEWASVPCSGGGGSGGGGSGGGGSRNLPVATPDPGMFPCLHHSQNLLRAVSNMLQKARQTLEFYPCTSEEIDHEDITKDKTSTVEACLPLELTKNESCLNSRETSFITNGSCLASRKTSFMMALCLSSIYEDLKMYQVEFKTMNAKLLMDPKRQIFLDQNMLAVIDELMQALNFNSETVPQKSSLEEPDFYKTKIKLCILLHAFRIRAVTIDRVMSYLNAS

SEQ ID NO: 22 - protein, 860 aa, artificial
  IL-12 (P40-P35)-Fc- SIRP alpha ECD with knobs mutations
  variant (761)..(860): sequence from positions 761 to 860 may be present in 1-3 copies (n=1, 2 or 3)
IWELKKDVYVVELDWYPDAPGEMVVLTCDTPEEDGITWTLDQSSEVLGSGKTLTIQVKEFGDAGQYTCHKGGEVLSHSLLLLHKKEDGIWSTDILKDQKEPKNKTFLRCEAKNYSGRFTCWWLTTISTDLTFSVKSSRGSSDPQGVTCGAATLSAERVRGDNKEYEYSVECQEDSACPAAEESLPIEVMVDAVHKLKYENYTSSFFIRDIIKPDPPKNLQLKPLKNSRQVEVSWEYPDTWSTPHSYFSLTFCVQVQGKSKREKKDRVFTDKTSATVICRKNASISVRAQDRYYSSSWSEWASVPCSGGGGSGGGGSGGGGSRNLPVATPDPGMFPCLHHSQNLLRAVSNMLQKARQTLEFYPCTSEEIDHEDITKDKTSTVEACLPLELTKNESCLNSRETSFITNGSCLASRKTSFMMALCLSSIYEDLKMYQVEFKTMNAKLLMDPKRQIFLDQNMLAVIDELMQALNFNSETVPQKSSLEEPDFYKTKIKLCILLHAFRIRAVTIDRVMSYLNASGGGGSGGGGSGGGGSDKTHTCPPCPAPELLGGPSVFLFPPKPKDTLMISRTPEVTCVVVDVSHEDPEVKFNWYVDGVEVHNAKTKPREEQYASTYRVVSVLTVLHQDWLNGKEYKCKVSNKALPAPIEKTISKAKGQPREPQVYTLPPCRDELTKNQVSLWCLVKGFYPSDIAVEWESNGQPENNYKTTPPVLDSDGSFFLYSKLTVDKSRWQQGNVFSCSVMHEALHNHYTQKSLSLSPGAGGGGSGGGGSGGGGSEEELQVIQPDKSVLVAAGETATLRCTATSLIPVGPIQWFRGAGPGRELIYNQKEGHFPRVTTVSDLTKRNNMDFSIRIGNITPAD

SEQ ID NO: 23 - protein, 906 aa, artificial
  CD47 ECD - Fc - IL-12 (P40-P35) with knobs mutations
  variant (1)..(146): sequence from positions 1 to 146 may be present in 1-3 copies (n=1, 2 or 3)
QLLFNKTKSVEFTFCNDTVVIPCFVTNMEAQNTTEVYVKWKFKGRDIYTFDGALNKSTVPTDFSSAKIEVSQLLKGDASLKMDKSDAVSHTGNYTCEVTELTREGETIIELKYRVVSWFSPNENILIVIFPGGGGSGGGGSGGGGSDKTHTCPPCPAPELLGGPSVFLFPPKPKDTLMISRTPEVTCVVVDVSHEDPEVKFNWYVDGVEVHNAKTKPREEQYASTYRVVSVLTVLHQDWLNGKEYKCKVSNKALPAPIEKTISKAKGQPREPQVYTLPPCRDELTKNQVSLWCLVKGFYPSDIAVEWESNGQPENNYKTTPPVLDSDGSFFLYSKLTVDKSRWQQGNVFSCSVMHEALHNHYTQKSLSLSPGAGGGGSGGGGSGGGGSIWELKKDVYVVELDWYPDAPGEMVVLTCDTPEEDGITWTLDQSSEVLGSGKTLTIQVKEFGDAGQYTCHKGGEVLSHSLLLLHKKEDGIWSTDILKDQKEPKNKTFLRCEAKNYSGRFTCWWLTTISTDLTFSVKSSRGSSDPQGVTCGAATLSAERVRGDNKEYEYSVECQEDSACPAAEESLPIEVMVDAVHKLKYENYTSSFFIRDIIKPDPPKNLQLKPLKNSRQVEVSWEYPDTWSTPHSYFSLTFCVQVQGKSKREKKDRVFTDKTSATVICRKNASISVRAQDRYYSSSWSEWASVPCSGGGGSGGGGSGGGGSRNLPVATPDPGMFPCLHHSQNLLRAVSNMLQKARQTLEFYPCTSEEIDHEDITKDKTSTVEACLPLELTKNESCLNSRETSFITNGSCLASRKTSFMMALCLSSIYEDLKMYQVEFKTMNAKLLMDPKRQIFLDQNMLAVIDELMQALNFNSETVPQKSSLEEPDFYKTKIKLCILLHAFRIRAVTIDRVMSYLNAS

SEQ ID NO: 24 - protein, 906 aa, artificial
  IL-12 (P40-P35)-Fc- CD47 ECD with knobs mutations
  variant (761)..(906): sequence from positions 761 to 906 may be present in 1-3 copies (n=1, 2 or 3)
IWELKKDVYVVELDWYPDAPGEMVVLTCDTPEEDGITWTLDQSSEVLGSGKTLTIQVKEFGDAGQYTCHKGGEVLSHSLLLLHKKEDGIWSTDILKDQKEPKNKTFLRCEAKNYSGRFTCWWLTTISTDLTFSVKSSRGSSDPQGVTCGAATLSAERVRGDNKEYEYSVECQEDSACPAAEESLPIEVMVDAVHKLKYENYTSSFFIRDIIKPDPPKNLQLKPLKNSRQVEVSWEYPDTWSTPHSYFSLTFCVQVQGKSKREKKDRVFTDKTSATVICRKNASISVRAQDRYYSSSWSEWASVPCSGGGGSGGGGSGGGGSRNLPVATPDPGMFPCLHHSQNLLRAVSNMLQKARQTLEFYPCTSEEIDHEDITKDKTSTVEACLPLELTKNESCLNSRETSFITNGSCLASRKTSFMMALCLSSIYEDLKMYQVEFKTMNAKLLMDPKRQIFLDQNMLAVIDELMQALNFNSETVPQKSSLEEPDFYKTKIKLCILLHAFRIRAVTIDRVMSYLNASGGGGSGGGGSGGGGSDKTHTCPPCPAPELLGGPSVFLFPPKPKDTLMISRTPEVTCVVVDVSHEDPEVKFNWYVDGVEVHNAKTKPREEQYASTYRVVSVLTVLHQDWLNGKEYKCKVSNKALPAPIEKTISKAKGQPREPQVYTLPPCRDELTKNQVSLWCLVKGFYPSDIAVEWESNGQPENNYKTTPPVLDSDGSFFLYSKLTVDKSRWQQGNVFSCSVMHEALHNHYTQKSLSLSPGAGGGGSGGGGSGGGGSQLLFNKTKSVEFTFCNDTVVIPCFVTNMEAQNTTEVYVKWKFKGRDIYTFDGALNKSTVPTDFSSAKIEVSQLLKGDASLKMDKSDAVSHTGNYTCEVTELTREGETIIELKYRVVSWFSPNENILIVIFP

SEQ ID NO: 25 - protein, 16 aa, artificial
  cleavable peptide linker
GGSLSGRSDNHGGGGS

SEQ ID NO: 26 - protein, 13 aa, artificial
  cleavable peptide linker
GGSLSGRSDNHGS

SEQ ID NO: 27 - protein, 42 aa, artificial
  GGGGSGGGGS GGGGSISSGL LSSGGSGGSL SGRSDNHGGG GS
GGGGSGGGGSGGGGSISSGLLSSGGSGGSLSGRSDNHGGGGS

SEQ ID NO: 28 - protein, 6 aa, artificial
  MMP-2/MMP-9 Cleavable peptide linkers
GPLGVR

SEQ ID NO: 29 - protein, 7 aa, artificial
  PLGMWSR
PLGMWSR

SEQ ID NO: 30 - protein, 7 aa, artificial
  MMP-2/MMP-9 Cleavable peptide linkers
PLGLWAR

SEQ ID NO: 31 - protein, 8 aa, artificial
  PQGIAGQR
PQGIAGQR

SEQ ID NO: 32 - protein, 6 aa, artificial
  PLGLAG
PLGLAG

SEQ ID NO: 33 - protein, 6 aa, artificial
  MMP-2/MMP-9 Cleavable peptide linkers
LALGPR

SEQ ID NO: 34 - protein, 10 aa, artificial
  MMP-2/MMP-9 Cleavable peptide linkers
GGPLGMLSQS

SEQ ID NO: 35 - protein, 9 aa, artificial
  urokinase plasminogen activator (uPA) Cleavable peptide linkers
GGGGRRGGS

SEQ ID NO: 36 - protein, 8 aa, artificial
  urokinase plasminogen activator (uPA) Cleavable peptide linkers
TGRGPSWV

SEQ ID NO: 37 - protein, 8 aa, artificial
  urokinase plasminogen activator (uPA) Cleavable peptide linkers
SARGPSRW

SEQ ID NO: 38 - protein, 8 aa, artificial
  urokinase plasminogen activator (uPA) Cleavable peptide linkers
TARGPSFK

SEQ ID NO: 39 - protein, 7 aa, artificial
  urokinase plasminogen activator (uPA) Cleavable peptide linkers
TARGPSW

SEQ ID NO: 40 - protein, 8 aa, artificial
  urokinase plasminogen activator (uPA) Cleavable peptide linkers
GGWHTGRN

SEQ ID NO: 41 - protein, 8 aa, artificial
  urokinase plasminogen activator (uPA) Cleavable peptide linkers
HTGRSGAL

SEQ ID NO: 42 - protein, 8 aa, artificial
  urokinase plasminogen activator (uPA) Cleavable peptide linkers
PLTGRSGG

SEQ ID NO: 43 - protein, 7 aa, artificial
  urokinase plasminogen activator (uPA) Cleavable peptide linkers
LTGRSGA

SEQ ID NO: 44 - protein, 8 aa, artificial
  matriptase cleavable peptide linker
RQARVVNG

SEQ ID NO: 45 - protein, 18 aa, artificial
  matriptase-MMP2/9 dual cleavable peptide linker
VHMPLGFLGPRQARVVNA

SEQ ID NO: 46 - protein, 306 aa, artificial
  Mutants of P40 subunit of IL-12
  variant (260)..(260): X is absent, K or A
  variant (261)..(261): X is absent, R or A
IWELKKDVYVVELDWYPDAPGEMVVLTCDTPEEDGITWTLDQSSEVLGSGKTLTIQVKEFGDAGQYTCHKGGEVLSHSLLLLHKKEDGIWSTDILKDQKEPKNKTFLRCEAKNYSGRFTCWWLTTISTDLTFSVKSSRGSSDPQGVTCGAATLSAERVRGDNKEYEYSVECQEDSACPAAEESLPIEVMVDAVHKLKYENYTSSFFIRDIIKPDPPKNLQLKPLKNSRQVEVSWEYPDTWSTPHSYFSLTFCVQVQGKSXXEKKDRVFTDKTSATVICRKNASISVRAQDRYYSSSWSEWASVPCS

SEQ ID NO: 47 - protein, 548 aa, artificial
  Fc - IL-12 P40 mutant with knobs mutations
DKTHTCPPCPAPELLGGPSVFLFPPKPKDTLMISRTPEVTCVVVDVSHEDPEVKFNWYVDGVEVHNAKTKPREEQYASTYRVVSVLTVLHQDWLNGKEYKCKVSNKALPAPIEKTISKAKGQPREPQVYTLPPCRDELTKNQVSLWCLVKGFYPSDIAVEWESNGQPENNYKTTPPVLDSDGSFFLYSKLTVDKSRWQQGNVFSCSVMHEALHNHYTQKSLSLSPGAGGGGSGGGGSGGGGSIWELKKDVYVVELDWYPDAPGEMVVLTCDTPEEDGITWTLDQSSEVLGSGKTLTIQVKEFGDAGQYTCHKGGEVLSHSLLLLHKKEDGIWSTDILKDQKEPKNKTFLRCEAKNYSGRFTCWWLTTISTDLTFSVKSSRGSSDPQGVTCGAATLSAERVRGDNKEYEYSVECQEDSACPAAEESLPIEVMVDAVHKLKYENYTSSFFIRDIIKPDPPKNLQLKPLKNSRQVEVSWEYPDTWSTPHSYFSLTFCVQVQGKSAAEKKDRVFTDKTSATVICRKNASISVRAQDRYYSSSWSEWASVPCS

SEQ ID NO: 48 - protein, 548 aa, artificial
  IL-12 P40 mutant-Fc with knobs mutations
IWELKKDVYVVELDWYPDAPGEMVVLTCDTPEEDGITWTLDQSSEVLGSGKTLTIQVKEFGDAGQYTCHKGGEVLSHSLLLLHKKEDGIWSTDILKDQKEPKNKTFLRCEAKNYSGRFTCWWLTTISTDLTFSVKSSRGSSDPQGVTCGAATLSAERVRGDNKEYEYSVECQEDSACPAAEESLPIEVMVDAVHKLKYENYTSSFFIRDIIKPDPPKNLQLKPLKNSRQVEVSWEYPDTWSTPHSYFSLTFCVQVQGKSAAEKKDRVFTDKTSATVICRKNASISVRAQDRYYSSSWSEWASVPCSGGGGSGGGGSGGGGSDKTHTCPPCPAPELLGGPSVFLFPPKPKDTLMISRTPEVTCVVVDVSHEDPEVKFNWYVDGVEVHNAKTKPREEQYASTYRVVSVLTVLHQDWLNGKEYKCKVSNKALPAPIEKTISKAKGQPREPQVYTLPPCRDELTKNQVSLWCLVKGFYPSDIAVEWESNGQPENNYKTTPPVLDSDGSFFLYSKLTVDKSRWQQGNVFSCSVMHEALHNHYTQKSLSLSPGK

SEQ ID NO: 49 - protein, 548 aa, artificial
  Fc - IL-12 mutant P40 with knobs mutations
DKTHTCPPCPAPELLGGPSVFLFPPKPKDTLMISRTPEVTCVVVDVSHEDPEVKFNWYVDGVEVHNAKTKPREEQYASTYRVVSVLTVLHQDWLNGKEYKCKVSNKALPAPIEKTISKAKGQPREPQVYTLPPCRDELTKNQVSLWCLVKGFYPSDIAVEWESNGQPENNYKTTPPVLDSDGSFFLYSKLTVDKSRWQQGNVFSCSVMHEALHNHYTQKSLSLSPGAGGGGSGGGGSGGGGSIWELKKDVYVVELDWYPDAPGEMVVLTCDTPEEDGITWTLDQSSEVLGSGKTLTIQVKEFGDAGQYTCHKGGEVLSHSLLLLHKKEDGIWSTDILKDQKEPKNKTFLRCEAKNYSGRFTCWWLTTISTDLTFSVKSSRGSSDPQGVTCGAATLSAERVRGDNKEYEYSVECQEDSACPAAEESLPIEVMVDAVHKLKYENYTSSFFIRDIIKPDPPKNLQLKPLKNSRQVEVSWEYPDTWSTPHSYFSLTFCVQVQGQDQDESGDRVFTDKTSATVICRKNASISVRAQDRYYSSSWSEWASVPCS

SEQ ID NO: 50 - protein, 548 aa, artificial
  IL-12 P40 mutant-Fc with knobs mutations
IWELKKDVYVVELDWYPDAPGEMVVLTCDTPEEDGITWTLDQSSEVLGSGKTLTIQVKEFGDAGQYTCHKGGEVLSHSLLLLHKKEDGIWSTDILKDQKEPKNKTFLRCEAKNYSGRFTCWWLTTISTDLTFSVKSSRGSSDPQGVTCGAATLSAERVRGDNKEYEYSVECQEDSACPAAEESLPIEVMVDAVHKLKYENYTSSFFIRDIIKPDPPKNLQLKPLKNSRQVEVSWEYPDTWSTPHSYFSLTFCVQVQGQDQDESGDRVFTDKTSATVICRKNASISVRAQDRYYSSSWSEWASVPCSGGGGSGGGGSGGGGSDKTHTCPPCPAPELLGGPSVFLFPPKPKDTLMISRTPEVTCVVVDVSHEDPEVKFNWYVDGVEVHNAKTKPREEQYASTYRVVSVLTVLHQDWLNGKEYKCKVSNKALPAPIEKTISKAKGQPREPQVYTLPPCRDELTKNQVSLWCLVKGFYPSDIAVEWESNGQPENNYKTTPPVLDSDGSFFLYSKLTVDKSRWQQGNVFSCSVMHEALHNHYTQKSLSLSPGK

SEQ ID NO: 51 - protein, 760 aa, artificial
  Fc - IL-12 (P40-P35) mutant with knobs mutations
DKTHTCPPCPAPELLGGPSVFLFPPKPKDTLMISRTPEVTCVVVDVSHEDPEVKFNWYVDGVEVHNAKTKPREEQYASTYRVVSVLTVLHQDWLNGKEYKCKVSNKALPAPIEKTISKAKGQPREPQVYTLPPCRDELTKNQVSLWCLVKGFYPSDIAVEWESNGQPENNYKTTPPVLDSDGSFFLYSKLTVDKSRWQQGNVFSCSVMHEALHNHYTQKSLSLSPGAGGGGSGGGGSGGGGSIWELKKDVYVVELDWYPDAPGEMVVLTCDTPEEDGITWTLDQSSEVLGSGKTLTIQVKEFGDAGQYTCHKGGEVLSHSLLLLHKKEDGIWSTDILKDQKEPKNKTFLRCEAKNYSGRFTCWWLTTISTDLTFSVKSSRGSSDPQGVTCGAATLSAERVRGDNKEYEYSVECQEDSACPAAEESLPIEVMVDAVHKLKYENYTSSFFIRDIIKPDPPKNLQLKPLKNSRQVEVSWEYPDTWSTPHSYFSLTFCVQVQGKSAAEKKDRVFTDKTSATVICRKNASISVRAQDRYYSSSWSEWASVPCSGGGGSGGGGSGGGGSRNLPVATPDPGMFPCLHHSQNLLRAVSNMLQKARQTLEFYPCTSEEIDHEDITKDKTSTVEACLPLELTKNESCLNSRETSFITNGSCLASRKTSFMMALCLSSIYEDLKMYQVEFKTMNAKLLMDPKRQIFLDQNMLAVIDELMQALNFNSETVPQKSSLEEPDFYKTKIKLCILLHAFRIRAVTIDRVMSYLNAS

SEQ ID NO: 52 - protein, 921 aa, artificial
  CD40L - Fc - IL-12 (P40-P35) mutant with knobs mutations
  variant (1)..(161): sequence from positions 1 to 161 may be present in 1-3 copies (n=1, 2 or 3)
GDQNPQIAAHVISEASSKTTSVLQWAEKGYYTMSNNLVTLENGKQLTVKRQGLYYIYAQVTFCSNREASSQAPFIASLCLKSPGRFERILLRAANTHSSAKPCGQQSIHLGGVFELQPGASVFVNVTDPSQVSHGTGFTSFGLLKLGGGGSGGGGSGGGGSDKTHTCPPCPAPELLGGPSVFLFPPKPKDTLMISRTPEVTCVVVDVSHEDPEVKFNWYVDGVEVHNAKTKPREEQYASTYRVVSVLTVLHQDWLNGKEYKCKVSNKALPAPIEKTISKAKGQPREPQVYTLPPCRDELTKNQVSLWCLVKGFYPSDIAVEWESNGQPENNYKTTPPVLDSDGSFFLYSKLTVDKSRWQQGNVFSCSVMHEALHNHYTQKSLSLSPGAGGGGSGGGGSGGGGSIWELKKDVYVVELDWYPDAPGEMVVLTCDTPEEDGITWTLDQSSEVLGSGKTLTIQVKEFGDAGQYTCHKGGEVLSHSLLLLHKKEDGIWSTDILKDQKEPKNKTFLRCEAKNYSGRFTCWWLTTISTDLTFSVKSSRGSSDPQGVTCGAATLSAERVRGDNKEYEYSVECQEDSACPAAEESLPIEVMVDAVHKLKYENYTSSFFIRDIIKPDPPKNLQLKPLKNSRQVEVSWEYPDTWSTPHSYFSLTFCVQVQGKSAAEKKDRVFTDKTSATVICRKNASISVRAQDRYYSSSWSEWASVPCSGGGGSGGGGSGGGGSRNLPVATPDPGMFPCLHHSQNLLRAVSNMLQKARQTLEFYPCTSEEIDHEDITKDKTSTVEACLPLELTKNESCLNSRETSFITNGSCLASRKTSFMMALCLSSIYEDLKMYQVEFKTMNAKLLMDPKRQIFLDQNMLAVIDELMQALNFNSETVPQKSSLEEPDFYKTKIKLCILLHAFRIRAVTIDRVMSYLNAS

SEQ ID NO: 53 - protein, 921 aa, artificial
  IL-12 (P40-P35) mutant - Fc - CD40L with knobs mutations
  variant (761)..(921): sequence from positions 761 to 921 may be absent or present in 1-3 copies (n=0, 1, 2 or 3)
IWELKKDVYVVELDWYPDAPGEMVVLTCDTPEEDGITWTLDQSSEVLGSGKTLTIQVKEFGDAGQYTCHKGGEVLSHSLLLLHKKEDGIWSTDILKDQKEPKNKTFLRCEAKNYSGRFTCWWLTTISTDLTFSVKSSRGSSDPQGVTCGAATLSAERVRGDNKEYEYSVECQEDSACPAAEESLPIEVMVDAVHKLKYENYTSSFFIRDIIKPDPPKNLQLKPLKNSRQVEVSWEYPDTWSTPHSYFSLTFCVQVQGKSAAEKKDRVFTDKTSATVICRKNASISVRAQDRYYSSSWSEWASVPCSGGGGSGGGGSGGGGSRNLPVATPDPGMFPCLHHSQNLLRAVSNMLQKARQTLEFYPCTSEEIDHEDITKDKTSTVEACLPLELTKNESCLNSRETSFITNGSCLASRKTSFMMALCLSSIYEDLKMYQVEFKTMNAKLLMDPKRQIFLDQNMLAVIDELMQALNFNSETVPQKSSLEEPDFYKTKIKLCILLHAFRIRAVTIDRVMSYLNASGGGGSGGGGSGGGGSDKTHTCPPCPAPELLGGPSVFLFPPKPKDTLMISRTPEVTCVVVDVSHEDPEVKFNWYVDGVEVHNAKTKPREEQYASTYRVVSVLTVLHQDWLNGKEYKCKVSNKALPAPIEKTISKAKGQPREPQVYTLPPCRDELTKNQVSLWCLVKGFYPSDIAVEWESNGQPENNYKTTPPVLDSDGSFFLYSKLTVDKSRWQQGNVFSCSVMHEALHNHYTQKSLSLSPGAGGGGSGGGGSGGGGSGDQNPQIAAHVISEASSKTTSVLQWAEKGYYTMSNNLVTLENGKQLTVKRQGLYYIYAQVTFCSNREASSQAPFIASLCLKSPGRFERILLRAANTHSSAKPCGQQSIHLGGVFELQPGASVFVNVTDPSQVSHGTGFTSFGLLKL

SEQ ID NO: 54 - protein, 760 aa, artificial
  Fc - IL-12 (P40-P35) mutant with knobs mutations
DKTHTCPPCPAPELLGGPSVFLFPPKPKDTLMISRTPEVTCVVVDVSHEDPEVKFNWYVDGVEVHNAKTKPREEQYASTYRVVSVLTVLHQDWLNGKEYKCKVSNKALPAPIEKTISKAKGQPREPQVYTLPPCRDELTKNQVSLWCLVKGFYPSDIAVEWESNGQPENNYKTTPPVLDSDGSFFLYSKLTVDKSRWQQGNVFSCSVMHEALHNHYTQKSLSLSPGAGGGGSGGGGSGGGGSIWELKKDVYVVELDWYPDAPGEMVVLTCDTPEEDGITWTLDQSSEVLGSGKTLTIQVKEFGDAGQYTCHKGGEVLSHSLLLLHKKEDGIWSTDILKDQKEPKNKTFLRCEAKNYSGRFTCWWLTTISTDLTFSVKSSRGSSDPQGVTCGAATLSAERVRGDNKEYEYSVECQEDSACPAAEESLPIEVMVDAVHKLKYENYTSSFFIRDIIKPDPPKNLQLKPLKNSRQVEVSWEYPDTWSTPHSYFSLTFCVQVQGQDQDESGDRVFTDKTSATVICRKNASISVRAQDRYYSSSWSEWASVPCSGGGGSGGGGSGGGGSRNLPVATPDPGMFPCLHHSQNLLRAVSNMLQKARQTLEFYPCTSEEIDHEDITKDKTSTVEACLPLELTKNESCLNSRETSFITNGSCLASRKTSFMMALCLSSIYEDLKMYQVEFKTMNAKLLMDPKRQIFLDQNMLAVIDELMQALNFNSETVPQKSSLEEPDFYKTKIKLCILLHAFRIRAVTIDRVMSYLNAS

SEQ ID NO: 55 - protein, 921 aa, artificial
  Fc - IL-12 (P40-P35) mutant with knobs mutations
  variant (1)..(161): sequence from positions 1 to 161 may be present in 1-3 copies (n=1, 2 or 3)
GDQNPQIAAHVISEASSKTTSVLQWAEKGYYTMSNNLVTLENGKQLTVKRQGLYYIYAQVTFCSNREASSQAPFIASLCLKSPGRFERILLRAANTHSSAKPCGQQSIHLGGVFELQPGASVFVNVTDPSQVSHGTGFTSFGLLKLGGGGSGGGGSGGGGSDKTHTCPPCPAPELLGGPSVFLFPPKPKDTLMISRTPEVTCVVVDVSHEDPEVKFNWYVDGVEVHNAKTKPREEQYASTYRVVSVLTVLHQDWLNGKEYKCKVSNKALPAPIEKTISKAKGQPREPQVYTLPPCRDELTKNQVSLWCLVKGFYPSDIAVEWESNGQPENNYKTTPPVLDSDGSFFLYSKLTVDKSRWQQGNVFSCSVMHEALHNHYTQKSLSLSPGAGGGGSGGGGSGGGGSIWELKKDVYVVELDWYPDAPGEMVVLTCDTPEEDGITWTLDQSSEVLGSGKTLTIQVKEFGDAGQYTCHKGGEVLSHSLLLLHKKEDGIWSTDILKDQKEPKNKTFLRCEAKNYSGRFTCWWLTTISTDLTFSVKSSRGSSDPQGVTCGAATLSAERVRGDNKEYEYSVECQEDSACPAAEESLPIEVMVDAVHKLKYENYTSSFFIRDIIKPDPPKNLQLKPLKNSRQVEVSWEYPDTWSTPHSYFSLTFCVQVQGQDQDESGDRVFTDKTSATVICRKNASISVRAQDRYYSSSWSEWASVPCSGGGGSGGGGSGGGGSRNLPVATPDPGMFPCLHHSQNLLRAVSNMLQKARQTLEFYPCTSEEIDHEDITKDKTSTVEACLPLELTKNESCLNSRETSFITNGSCLASRKTSFMMALCLSSIYEDLKMYQVEFKTMNAKLLMDPKRQIFLDQNMLAVIDELMQALNFNSETVPQKSSLEEPDFYKTKIKLCILLHAFRIRAVTIDRVMSYLNAS

SEQ ID NO: 56 - protein, 921 aa, artificial
  IL-12 (P40-P35) mutant - Fc - CD40L with knobs mutations
  variant (761)..(921): sequence from positions 761 to 921 may be absent or present in 1-3 copies (n=0, 1, 2 or 3)
IWELKKDVYVVELDWYPDAPGEMVVLTCDTPEEDGITWTLDQSSEVLGSGKTLTIQVKEFGDAGQYTCHKGGEVLSHSLLLLHKKEDGIWSTDILKDQKEPKNKTFLRCEAKNYSGRFTCWWLTTISTDLTFSVKSSRGSSDPQGVTCGAATLSAERVRGDNKEYEYSVECQEDSACPAAEESLPIEVMVDAVHKLKYENYTSSFFIRDIIKPDPPKNLQLKPLKNSRQVEVSWEYPDTWSTPHSYFSLTFCVQVQGQDQDESGDRVFTDKTSATVICRKNASISVRAQDRYYSSSWSEWASVPCSGGGGSGGGGSGGGGSRNLPVATPDPGMFPCLHHSQNLLRAVSNMLQKARQTLEFYPCTSEEIDHEDITKDKTSTVEACLPLELTKNESCLNSRETSFITNGSCLASRKTSFMMALCLSSIYEDLKMYQVEFKTMNAKLLMDPKRQIFLDQNMLAVIDELMQALNFNSETVPQKSSLEEPDFYKTKIKLCILLHAFRIRAVTIDRVMSYLNASGGGGSGGGGSGGGGSDKTHTCPPCPAPELLGGPSVFLFPPKPKDTLMISRTPEVTCVVVDVSHEDPEVKFNWYVDGVEVHNAKTKPREEQYASTYRVVSVLTVLHQDWLNGKEYKCKVSNKALPAPIEKTISKAKGQPREPQVYTLPPCRDELTKNQVSLWCLVKGFYPSDIAVEWESNGQPENNYKTTPPVLDSDGSFFLYSKLTVDKSRWQQGNVFSCSVMHEALHNHYTQKSLSLSPGAGGGGSGGGGSGGGGSGDQNPQIAAHVISEASSKTTSVLQWAEKGYYTMSNNLVTLENGKQLTVKRQGLYYIYAQVTFCSNREASSQAPFIASLCLKSPGRFERILLRAANTHSSAKPCGQQSIHLGGVFELQPGASVFVNVTDPSQVSHGTGFTSFGLLKL

SEQ ID NO: 57 - protein, 507 aa, artificial
  Fc- scFV which binds to IL-12-VL-VH Ustekinumab
MGVKVLFALICIAVAEADKTHTCPPCPAPELLGGPSVFLFPPKPKDTLMISRTPEVTCVVVDVSHEDPEVKFNWYVDGVEVHNAKTKPREEQYNSTYRVVSVLTVLHQDWLNGKEYKCKVSNKALPAPIEKTISKAKGQPREPQVCTLPPSRDELTKNQVSLSCAVKGFYPSDIAVEWESNGQPENNYKTTPPVLDSDGSFFLVSKLTVDKSRWQQGNVFSCSVMHEALHNHYTQKSLSLSPGAGGGGSGGGGSAAGGGGSGGGGSDIQMTQSPSSLSASVGDRVTITCRASQGISSWLAWYQQKPEKAPKSLIYAASSLQSGVPSRFSGSGSGTDFTLTISSLQPEDFATYYCQQYNIYPYTFGQGTKLEIKGGGGSGGGGSGGGGSEVQLVQSGAEVKKPGESLKISCKGSGYSFTTYWLGWVRQMPGKGLDWIGIMSPVDSDIRYSPSFQGQVTMSVDKSITTAYLQWNSLKASDTAMYYCARRRPGQGYFDFWGQGTLVTVSS

SEQ ID NO: 58 - protein, 489 aa, artificial
  Fc - scFV which binds to IL-12-VL-VH Ustekinumab with cleavable linker
DKTHTCPPCPAPELLGGPSVFLFPPKPKDTLMISRTPEVTCVVVDVSHEDPEVKFNWYVDGVEVHNAKTKPREEQYNSTYRVVSVLTVLHQDWLNGKEYKCKVSNKALPAPIEKTISKAKGQPREPQVCTLPPSRDELTKNQVSLSCAVKGFYPSDIAVEWESNGQPENNYKTTPPVLDSDGSFFLVSKLTVDKSRWQQGNVFSCSVMHEALHNHYTQKSLSLSPGAGGGGSGGGGSGPLGVRGGGGSDIQMTQSPSSLSASVGDRVTITCRASQGISSWLAWYQQKPEKAPKSLIYAASSLQSGVPSRFSGSGSGTDFTLTISSLQPEDFATYYCQQYNIYPYTFGQGTKLEIKGGGGSGGGGSGGGGSEVQLVQSGAEVKKPGESLKISCKGSGYSFTTYWLGWVRQMPGKGLDWIGIMSPVDSDIRYSPSFQGQVTMSVDKSITTAYLQWNSLKASDTAMYYCARRRPGQGYFDFWGQGTLVTVSS

SEQ ID NO: 59 - protein, 651 aa, artificial
  CD40L - Fc - scFV which binds to IL-12-VL-VH Ustekinumab
  variant (1)..(161): sequence from positions 1 to 161 may be present in 1-3 copies (n=1, 2 or 3)
GDQNPQIAAHVISEASSKTTSVLQWAEKGYYTMSNNLVTLENGKQLTVKRQGLYYIYAQVTFCSNREASSQAPFIASLCLKSPGRFERILLRAANTHSSAKPCGQQSIHLGGVFELQPGASVFVNVTDPSQVSHGTGFTSFGLLKLGGGGSGGGGSGGGGSDKTHTCPPCPAPELLGGPSVFLFPPKPKDTLMISRTPEVTCVVVDVSHEDPEVKFNWYVDGVEVHNAKTKPREEQYNSTYRVVSVLTVLHQDWLNGKEYKCKVSNKALPAPIEKTISKAKGQPREPQVCTLPPSRDELTKNQVSLSCAVKGFYPSDIAVEWESNGQPENNYKTTPPVLDSDGSFFLVSKLTVDKSRWQQGNVFSCSVMHEALHNHYTQKSLSLSPGAGGGGSGGGGSAAGGGGSGGGGSDIQMTQSPSSLSASVGDRVTITCRASQGISSWLAWYQQKPEKAPKSLIYAASSLQSGVPSRFSGSGSGTDFTLTISSLQPEDFATYYCQQYNIYPYTFGQGTKLEIKGGGGSGGGGSGGGGSEVQLVQSGAEVKKPGESLKISCKGSGYSFTTYWLGWVRQMPGKGLDWIGIMSPVDSDIRYSPSFQGQVTMSVDKSITTAYLQWNSLKASDTAMYYCARRRPGQGYFDFWGQGTLVTVSS

SEQ ID NO: 60 - protein, 650 aa, artificial
  CD40L - Fc - scFV which binds to IL-12-VL-VH Briakinnumab- Ustekinumab with cleavable linker
  variant (1)..(161): sequence from positions 1 to 161 may be present in 1-3 copies (n=1, 2 or 3)
GDQNPQIAAHVISEASSKTTSVLQWAEKGYYTMSNNLVTLENGKQLTVKRQGLYYIYAQVTFCSNREASSQAPFIASLCLKSPGRFERILLRAANTHSSAKPCGQQSIHLGGVFELQPGASVFVNVTDPSQVSHGTGFTSFGLLKLGGGGSGGGGSGGGGSDKTHTCPPCPAPELLGGPSVFLFPPKPKDTLMISRTPEVTCVVVDVSHEDPEVKFNWYVDGVEVHNAKTKPREEQYNSTYRVVSVLTVLHQDWLNGKEYKCKVSNKALPAPIEKTISKAKGQPREPQVCTLPPSRDELTKNQVSLSCAVKGFYPSDIAVEWESNGQPENNYKTTPPVLDSDGSFFLVSKLTVDKSRWQQGNVFSCSVMHEALHNHYTQKSLSLSPGAGGGGSGGGGSGPLGVRGGGGSDIQMTQSPSSLSASVGDRVTITCRASQGISSWLAWYQQKPEKAPKSLIYAASSLQSGVPSRFSGSGSGTDFTLTISSLQPEDFATYYCQQYNIYPYTFGQGTKLEIKGGGGSGGGGSGGGGSEVQLVQSGAEVKKPGESLKISCKGSGYSFTTYWLGWVRQMPGKGLDWIGIMSPVDSDIRYSPSFQGQVTMSVDKSITTAYLQWNSLKASDTAMYYCARRRPGQGYFDFWGQGTLVTVSS

SEQ ID NO: 61 - protein, 651 aa, artificial
  scFV which binds to IL-12-VL-VH Ustekinumab - Fc - CD40L
  variant (491)..(651): sequence from positions 491 to 651 may be absent or present in 1-3 copies (n=0, 1, 2 or 3)
DIQMTQSPSSLSASVGDRVTITCRASQGISSWLAWYQQKPEKAPKSLIYAASSLQSGVPSRFSGSGSGTDFTLTISSLQPEDFATYYCQQYNIYPYTFGQGTKLEIKGGGGSGGGGSGGGGSEVQLVQSGAEVKKPGESLKISCKGSGYSFTTYWLGWVRQMPGKGLDWIGIMSPVDSDIRYSPSFQGQVTMSVDKSITTAYLQWNSLKASDTAMYYCARRRPGQGYFDFWGQGTLVTVSSGGGGSGGGGSAAGGGGSGGGGSDKTHTCPPCPAPELLGGPSVFLFPPKPKDTLMISRTPEVTCVVVDVSHEDPEVKFNWYVDGVEVHNAKTKPREEQYNSTYRVVSVLTVLHQDWLNGKEYKCKVSNKALPAPIEKTISKAKGQPREPQVCTLPPSRDELTKNQVSLSCAVKGFYPSDIAVEWESNGQPENNYKTTPPVLDSDGSFFLVSKLTVDKSRWQQGNVFSCSVMHEALHNHYTQKSLSLSPGAGGGGSGGGGSGGGGSGDQNPQIAAHVISEASSKTTSVLQWAEKGYYTMSNNLVTLENGKQLTVKRQGLYYIYAQVTFCSNREASSQAPFIASLCLKSPGRFERILLRAANTHSSAKPCGQQSIHLGGVFELQPGASVFVNVTDPSQVSHGTGFTSFGLLKL

SEQ ID NO: 62 - protein, 650 aa, artificial
  scFV which binds to IL-12-VL-VH Ustekinumab  - Fc - CD40L, with a cleavable linker
  variant (490)..(650): sequence from positions 490 to 650 may be absent or present in 1-3 copies (n=0, 1, 2 or 3)
DIQMTQSPSSLSASVGDRVTITCRASQGISSWLAWYQQKPEKAPKSLIYAASSLQSGVPSRFSGSGSGTDFTLTISSLQPEDFATYYCQQYNIYPYTFGQGTKLEIKGGGGSGGGGSGGGGSEVQLVQSGAEVKKPGESLKISCKGSGYSFTTYWLGWVRQMPGKGLDWIGIMSPVDSDIRYSPSFQGQVTMSVDKSITTAYLQWNSLKASDTAMYYCARRRPGQGYFDFWGQGTLVTVSSGGGGSGGGGSGPLGVRGGGGSDKTHTCPPCPAPELLGGPSVFLFPPKPKDTLMISRTPEVTCVVVDVSHEDPEVKFNWYVDGVEVHNAKTKPREEQYNSTYRVVSVLTVLHQDWLNGKEYKCKVSNKALPAPIEKTISKAKGQPREPQVCTLPPSRDELTKNQVSLSCAVKGFYPSDIAVEWESNGQPENNYKTTPPVLDSDGSFFLVSKLTVDKSRWQQGNVFSCSVMHEALHNHYTQKSLSLSPGAGGGGSGGGGSGGGGSGDQNPQIAAHVISEASSKTTSVLQWAEKGYYTMSNNLVTLENGKQLTVKRQGLYYIYAQVTFCSNREASSQAPFIASLCLKSPGRFERILLRAANTHSSAKPCGQQSIHLGGVFELQPGASVFVNVTDPSQVSHGTGFTSFGLLKL

SEQ ID NO: 63 - protein, 306 aa, artificial
  IL-12 subunit P40 mutant
IWELKKDVYVVELDWYPDAPGEMVVLTCDTPEEDGITWTLDQSSEVLGSGKTLTIQVKEFGDAGQYTCHKGGEVLSHSLLLLHKKEDGIWSTDILKDQKEPKNKTFLRCEAKNYSGRFTCWWLTTISTDLTFSVKSSRGSSDPQGVTCGAATLSAERVRGDNKEYEYSVECQEDSACPAAEESLPIEVMVDAVHKLKYENYTSSFFIRDIIKPDPPKNLQLKPLKNSRQVEVSWEYPDTWSTPHSYFSLTFCVQVQGQDQDESGDRVFTDKTSATVICRKNASISVRAQDRYYSSSWSEWASVPCS

SEQ ID NO: 64 - protein, 65 aa, artificial
  Amino acid sequence of IL-15 receptor alpha Sushi domain
ITCPPPMSVEHADIWVKSYSLYSRERYICNSGFKRKAGTSSLTECVLNKATNVAHWTTPSLKCIR

SEQ ID NO: 65 - protein, 113 aa, artificial
  NWVNVISDLK KIEDLIQSMH IDATLYTESD VHPSCKVTAM KCFLLELQVI SLESGDASIH DTVENLIILA NNSLSSNGNV TESGCKECEE LEEKNIKEFL QSFVHIVQMF INT
NWVNVISDLKKIEDLIQSMHIDATLYTESDVHPSCKVTAMKCFLLELQVISLESGDASIHDTVENLIILANNSLSSNGNVTESGCKECEELEEKNIKEFLQSFVHIVQMFINT

SEQ ID NO: 66 - protein, 113 aa, artificial
  Human IL-15 mutant S58K
NWVNVISDLKKIEDLIQSMHIDATLYTESDVHPSCKVTAMKCFLLELQVISLESGDAKIHDTVENLIILANNSLSSNGNVTESGCKECEELEEKNIKEFLQSFVHIVQMFINT

SEQ ID NO: 67 - protein, 238 aa, artificial
  anti-IL-15 scFv1 ver2
EVQLVQSGAEVKKPGESLKISCKVSGYFFTTYWIGWVRQMPGKGLEYMGIIYPGDSDTRYSPSFQGQVTISADKSISTAYLQWSSLKASDTAMYYCARGGNWNCFDYWGQGTLVTVSSGGGGSGGGGSGGGGSEIVLTQSPGTLSLSPGREATLSCRASQSVSSSYLAWYQQKPGQAPRLLIYGASRRATGIPDRFSGSGSGTDFTLTISRLEPEDFAVYYCQRYGSSHTFGQGTKLE

SEQ ID NO: 68 - protein, 274 aa, artificial
  ectodomain of a NKG2D ligand
EPHSLRYNLTVLSWDGSVQSGFLTEVHLDGQPFLRCDRQKCRAKPQGQWAEDVLGNKTWDRETRDLTGNGKDLRMTLAHIKDQKEGLHSLQEIRVCEIHEDNSTRSSQHFYYDGELFLSQNLETKEWTMPQSSRAQTLAMNVRNFLKEDAMKTKTHYHAMHADCLQELRRYLKSGVVLRRTVPPMVNVTRSEASEGNITVTCRASGFYPWNITLSWRQDGVSLSHDTQQWGDVLPDGNGTYQTWVATRICQGEEQRFTCYMEHSGNHSTHPVPS

SEQ ID NO: 69 - protein, 124 aa, artificial
  AS20592VH10 sdAb amino acid sequence
EVQLVESGGGLVQPGGSLRLSCAASGYIISSYCMGWFRQAPGKGLEGVAAIDSDGGTSYADSVKGRFTISKDNSKNTLYLQMNSLRAEDTAMYYCAADFCWVDEDRHLYEYNSWGQGTLVTVSS

SEQ ID NO: 70 - protein, 124 aa, artificial
  AS20592VH10M1 sdAb amino acid sequence
EVQLVESGGGLVQPGGSLRLSCAASGYIISSYCMGWFRQAPGKGLEGVAAIDSSGGTSYADSVKGRFTISKDNSKNTLYLQMNSLRAEDTAMYYCAADFCWVDEDRHLYEYNSWGQGTLVTVSS

SEQ ID NO: 71 - protein, 121 aa, artificial
  AS20594VH10 sdAb amino acid sequence
EVQLVESGGGLVQPGGSLRLSCAASGYTISSYCMGWFRQAPGKGLEGVAAIDSDGSTSYADSVKGRFTISKDNSKNTLYLQMNSLRAEDTAVYYCAADFCWVDDFYEYNYWGQGTLVTVSS

SEQ ID NO: 72 - protein, 121 aa, artificial
  AS20594VH10M1 sdAb amino acid sequence
EVQLVESGGGLVQPGGSLRLSCAASGYTISSYCMGWFRQAPGKGLEGVAAIDSSGSTSYADSVKGRFTISKDNSKNTLYLQMNSLRAEDTAVYYCAADFCWVDDFYEYNYWGQGTLVTVSS

SEQ ID NO: 73 - protein, 122 aa, artificial
  AS20846VH12 sdAb amino acid sequence
EVQLVESGGGLVQPGGSLRLSCAASGYTVSSYCMGWFRQAPGKGREGVSAIDSDGSVSYADSVKGRFTISKDNSKNTLYLQMNSLRAEDTAVYFCAADLCWVDQDQGEYNTWGQGTLVTVSS

SEQ ID NO: 74 - protein, 122 aa, artificial
  AS20846VH12M1 sdAb amino acid sequence
EVQLVESGGGLVQPGGSLRLSCAASGYTVSSYCMGWFRQAPGKGREGVSAIDSSGSVSYADSVKGRFTISKDNSKNTLYLQMNSLRAEDTAVYFCAADLCWVDQDQGEYNTWGQGTLVTVSS

SEQ ID NO: 75 - protein, 126 aa, artificial
  AS20601VH4 sdAb amino acid sequence
EVQLVESGGGLVQPGGSLRLSCAASGYTYGGYCMGWFRQAPGKGLEGVSTINSDGSTNYADSVKGRFTISRDNSKNTLYLQMNSLRAEDTAVYYCAVDLAPCWVAGPIEAADFGYWGQGTLVTVSS

SEQ ID NO: 76 - protein, 126 aa, artificial
  AS20601VH4.M6 sdAb amino acid sequence
EVQLVESGGGLVQPGGSLRLSCAASGYTYGGYCMGWFRQAPGKGLEGVSTIASEGSTNYADSVKGRFTISRDNSKNTLYLQMNSLRAEDTAVYYCAVDLAPCWVAGPIEAADFGYWGQGTLVTVSS

SEQ ID NO: 77 - protein, 126 aa, artificial
  AS20601VH4.M7 sdAb amino acid sequence
EVQLVESGGGLVQPGGSLRLSCAASGYTYGGYCMGWFRQAPGKGLEGVSTIASSGSTNYADSVKGRFTISRDNSKNTLYLQMNSLRAEDTAVYYCAVDLAPCWVAGPIEAADFGYWGQGTLVTVSS

SEQ ID NO: 78 - protein, 117 aa, artificial
  VH of a 5T4 antibody
QVQLQESGPGLVKPSETLSITCTVSGVSISSYGLHWIRQPPGKSLEWLGVIWASGRTNYNPALKSRVTISGDTSKNQVSLKLSGVTAADTAVYYCAGSNWGYAMDYWGQGTLVTVSS

SEQ ID NO: 79 - protein, 107 aa, artificial
  VL of a 5T4 antibody
AIRMTQSPSSFSASAGDRVTITCRASENIYSYLAWYQQKPGKSPKLLIYNAKTLAEGVPSRFSGSGSGTDFTLTISSLQPEDFATYYCQHHYAIPYTFGQGTKLEIK

SEQ ID NO: 80 - protein, 490 aa, artificial
  Fc-scFV which binds to IL-12 - Briakinnumab (ASKGD111_CX10_64_2)
DKTHTCPPCPAPEAAGGPSVFLFPPKPKDTLMISRTPEVTCVVVDVSHEDPEVKFNWYVDGVEVHNAKTKPREEQYNSTYRVVSVLTVLHQDWLNGKEYKCKVSNKALPAPIEKTISKAKGQPREPQVCTLPPSRDELTKNQVSLSCAVKGFYPSDIAVEWESNGQPENNYKTTPPVLDSDGSFFLVSKLTVDKSRWQQGNVFSCSVMHEALHNHYTQKSLSLSPGAGGGGSGGGGSAAGGGGSGGGGSQSVLTQPPSVSGAPGQRVTISCSGSRSNIGSNTVKWYQQLPGTAPKLLIYYNDQRPSGVPDRFSGSKSGTSASLAITGLQAEDEADYYCQSYDRYTHPALLFGTGTKVTVLGGGGSGGGGSGGGGSQVQLVESGGGVVQPGRSLRLSCAASGFTFSSYGMHWVRQAPGKGLEWVAFIRYDGSNKYYADSVKGRFTISRDNSKNTLYLQMNSLRAEDTAVYYCKTHGSHDNWGQGTMVTVSS

SEQ ID NO: 81 - protein, 760 aa, artificial
  Fc - IL-12 (P40-P35) with knobs mutations (ASKG111_CX5_43_1)
DKTHTCPPCPAPEAAGGPSVFLFPPKPKDTLMISRTPEVTCVVVDVSHEDPEVKFNWYVDGVEVHNAKTKPREEQYASTYRVVSVLTVLHQDWLNGKEYKCKVSNKALPAPIEKTISKAKGQPREPQVYTLPPCRDELTKNQVSLWCLVKGFYPSDIAVEWESNGQPENNYKTTPPVLDSDGSFFLYSKLTVDKSRWQQGNVFSCSVMHEALHNHYTQKSLSLSPGAGGGGSGGGGSGGGGSIWELKKDVYVVELDWYPDAPGEMVVLTCDTPEEDGITWTLDQSSEVLGSGKTLTIQVKEFGDAGQYTCHKGGEVLSHSLLLLHKKEDGIWSTDILKDQKEPKNKTFLRCEAKNYSGRFTCWWLTTISTDLTFSVKSSRGSSDPQGVTCGAATLSAERVRGDNKEYEYSVECQEDSACPAAEESLPIEVMVDAVHKLKYENYTSSFFIRDIIKPDPPKNLQLKPLKNSRQVEVSWEYPDTWSTPHSYFSLTFCVQVQGKSKREKKDRVFTDKTSATVICRKNASISVRAQDRYYSSSWSEWASVPCSGGGGSGGGGSGGGGSRNLPVATPDPGMFPCLHHSQNLLRAVSNMLQKARQTLEFYPCTSEEIDHEDITKDKTSTVEACLPLELTKNESCLNSRETSFITNGSCLASRKTSFMMALCLSSIYEDLKMYQVEFKTMNAKLLMDPKRQIFLDQNMLAVIDELMQALNFNSETVPQKSSLEEPDFYKTKIKLCILLHAFRIRAVTIDRVMSYLNAS

SEQ ID NO: 82 - protein, 760 aa, artificial
  Fc - IL-12 (P40-P35A1-K128N) with knobs (ASKGC111_CX14_25_1)
DKTHTCPPCPAPELLGGPSVFLFPPKPKDTLMISRTPEVTCVVVDVSHEDPEVKFNWYVDGVEVHNAKTKPREEQYASTYRVVSVLTVLHQDWLNGKEYKCKVSNKALPAPIEKTISKAKGQPREPQVYTLPPCRDELTKNQVSLWCLVKGFYPSDIAVEWESNGQPENNYKTTPPVLDSDGSFFLYSKLTVDKSRWQQGNVFSCSVMHEALHNHYTQKSLSLSPGAGGGGSGGGGSGGGGSIWELKKDVYVVELDWYPDAPGEMVVLTCDTPEEDGITWTLDQSSEVLGSGKTLTIQVKEFGDAGQYTCHKGGEVLSHSLLLLHKKEDGIWSTDILKDQKEPKNKTFLRCEAKNYSGRFTCWWLTTISTDLTFSVKSSRGSSDPQGVTCGAATLSAERVRGDNKEYEYSVECQEDSACPAAEESLPIEVMVDAVHKLKYENYTSSFFIRDIIKPDPPKNLQLKPLKNSRQVEVSWEYPDTWSTPHSYFSLTFCVQVQGKSKREKKDRVFTDKTSATVICRKNASISVRAQDRYYSSSWSEWASVPCSGGGGSGGGGSGGGGSRNLPVATPDPGMFPCLHHSQNLLRAVSNMLQKARQTLEFYPCTSEEIDHEDITKDKTSTVEACLPLELTKNESCLNSRETSFITNGSCLASRKTSFMMALCLSSIYEDLKMYQVEFKTMNAKLLMDPNRQIFLDQNMLAVIDELMQALNFNSETVPQKSSLEEPDFYKTKIKLCILLHAFRIRAVTIDRVMSYLNAS

SEQ ID NO: 83 - protein, 760 aa, artificial
  Fc - IL-12 (P40-P35A2-K128A) with knobs (ASKGC111_CX14_25_2)
DKTHTCPPCPAPELLGGPSVFLFPPKPKDTLMISRTPEVTCVVVDVSHEDPEVKFNWYVDGVEVHNAKTKPREEQYASTYRVVSVLTVLHQDWLNGKEYKCKVSNKALPAPIEKTISKAKGQPREPQVYTLPPCRDELTKNQVSLWCLVKGFYPSDIAVEWESNGQPENNYKTTPPVLDSDGSFFLYSKLTVDKSRWQQGNVFSCSVMHEALHNHYTQKSLSLSPGAGGGGSGGGGSGGGGSIWELKKDVYVVELDWYPDAPGEMVVLTCDTPEEDGITWTLDQSSEVLGSGKTLTIQVKEFGDAGQYTCHKGGEVLSHSLLLLHKKEDGIWSTDILKDQKEPKNKTFLRCEAKNYSGRFTCWWLTTISTDLTFSVKSSRGSSDPQGVTCGAATLSAERVRGDNKEYEYSVECQEDSACPAAEESLPIEVMVDAVHKLKYENYTSSFFIRDIIKPDPPKNLQLKPLKNSRQVEVSWEYPDTWSTPHSYFSLTFCVQVQGKSKREKKDRVFTDKTSATVICRKNASISVRAQDRYYSSSWSEWASVPCSGGGGSGGGGSGGGGSRNLPVATPDPGMFPCLHHSQNLLRAVSNMLQKARQTLEFYPCTSEEIDHEDITKDKTSTVEACLPLELTKNESCLNSRETSFITNGSCLASRKTSFMMALCLSSIYEDLKMYQVEFKTMNAKLLMDPARQIFLDQNMLAVIDELMQALNFNSETVPQKSSLEEPDFYKTKIKLCILLHAFRIRAVTIDRVMSYLNAS

SEQ ID NO: 84 - protein, 760 aa, artificial
  Fc - IL-12 (P40-P35D-Y40A) with knobs (ASKGC111_CX14_25_3)
DKTHTCPPCPAPELLGGPSVFLFPPKPKDTLMISRTPEVTCVVVDVSHEDPEVKFNWYVDGVEVHNAKTKPREEQYASTYRVVSVLTVLHQDWLNGKEYKCKVSNKALPAPIEKTISKAKGQPREPQVYTLPPCRDELTKNQVSLWCLVKGFYPSDIAVEWESNGQPENNYKTTPPVLDSDGSFFLYSKLTVDKSRWQQGNVFSCSVMHEALHNHYTQKSLSLSPGAGGGGSGGGGSGGGGSIWELKKDVYVVELDWYPDAPGEMVVLTCDTPEEDGITWTLDQSSEVLGSGKTLTIQVKEFGDAGQYTCHKGGEVLSHSLLLLHKKEDGIWSTDILKDQKEPKNKTFLRCEAKNYSGRFTCWWLTTISTDLTFSVKSSRGSSDPQGVTCGAATLSAERVRGDNKEYEYSVECQEDSACPAAEESLPIEVMVDAVHKLKYENYTSSFFIRDIIKPDPPKNLQLKPLKNSRQVEVSWEYPDTWSTPHSYFSLTFCVQVQGKSKREKKDRVFTDKTSATVICRKNASISVRAQDRYYSSSWSEWASVPCSGGGGSGGGGSGGGGSRNLPVATPDPGMFPCLHHSQNLLRAVSNMLQKARQTLEFAPCTSEEIDHEDITKDKTSTVEACLPLELTKNESCLNSRETSFITNGSCLASRKTSFMMALCLSSIYEDLKMYQVEFKTMNAKLLMDPKRQIFLDQNMLAVIDELMQALNFNSETVPQKSSLEEPDFYKTKIKLCILLHAFRIRAVTIDRVMSYLNAS

SEQ ID NO: 85 - protein, 760 aa, artificial
  Fc - IL-12(P40-P35F-E45A/E46A) with knobs (ASKGC111_CX14_25_4)
DKTHTCPPCPAPELLGGPSVFLFPPKPKDTLMISRTPEVTCVVVDVSHEDPEVKFNWYVDGVEVHNAKTKPREEQYASTYRVVSVLTVLHQDWLNGKEYKCKVSNKALPAPIEKTISKAKGQPREPQVYTLPPCRDELTKNQVSLWCLVKGFYPSDIAVEWESNGQPENNYKTTPPVLDSDGSFFLYSKLTVDKSRWQQGNVFSCSVMHEALHNHYTQKSLSLSPGAGGGGSGGGGSGGGGSIWELKKDVYVVELDWYPDAPGEMVVLTCDTPEEDGITWTLDQSSEVLGSGKTLTIQVKEFGDAGQYTCHKGGEVLSHSLLLLHKKEDGIWSTDILKDQKEPKNKTFLRCEAKNYSGRFTCWWLTTISTDLTFSVKSSRGSSDPQGVTCGAATLSAERVRGDNKEYEYSVECQEDSACPAAEESLPIEVMVDAVHKLKYENYTSSFFIRDIIKPDPPKNLQLKPLKNSRQVEVSWEYPDTWSTPHSYFSLTFCVQVQGKSKREKKDRVFTDKTSATVICRKNASISVRAQDRYYSSSWSEWASVPCSGGGGSGGGGSGGGGSRNLPVATPDPGMFPCLHHSQNLLRAVSNMLQKARQTLEFYPCTSAAIDHEDITKDKTSTVEACLPLELTKNESCLNSRETSFITNGSCLASRKTSFMMALCLSSIYEDLKMYQVEFKTMNAKLLMDPKRQIFLDQNMLAVIDELMQALNFNSETVPQKSSLEEPDFYKTKIKLCILLHAFRIRAVTIDRVMSYLNAS

SEQ ID NO: 86 - protein, 760 aa, artificial
  Fc - IL-12 (P40-P35G-D48A/H49A) with knobs (ASKGC111_CX14_25_5)
DKTHTCPPCPAPELLGGPSVFLFPPKPKDTLMISRTPEVTCVVVDVSHEDPEVKFNWYVDGVEVHNAKTKPREEQYASTYRVVSVLTVLHQDWLNGKEYKCKVSNKALPAPIEKTISKAKGQPREPQVYTLPPCRDELTKNQVSLWCLVKGFYPSDIAVEWESNGQPENNYKTTPPVLDSDGSFFLYSKLTVDKSRWQQGNVFSCSVMHEALHNHYTQKSLSLSPGAGGGGSGGGGSGGGGSIWELKKDVYVVELDWYPDAPGEMVVLTCDTPEEDGITWTLDQSSEVLGSGKTLTIQVKEFGDAGQYTCHKGGEVLSHSLLLLHKKEDGIWSTDILKDQKEPKNKTFLRCEAKNYSGRFTCWWLTTISTDLTFSVKSSRGSSDPQGVTCGAATLSAERVRGDNKEYEYSVECQEDSACPAAEESLPIEVMVDAVHKLKYENYTSSFFIRDIIKPDPPKNLQLKPLKNSRQVEVSWEYPDTWSTPHSYFSLTFCVQVQGKSKREKKDRVFTDKTSATVICRKNASISVRAQDRYYSSSWSEWASVPCSGGGGSGGGGSGGGGSRNLPVATPDPGMFPCLHHSQNLLRAVSNMLQKARQTLEFYPCTSEEIAAEDITKDKTSTVEACLPLELTKNESCLNSRETSFITNGSCLASRKTSFMMALCLSSIYEDLKMYQVEFKTMNAKLLMDPKRQIFLDQNMLAVIDELMQALNFNSETVPQKSSLEEPDFYKTKIKLCILLHAFRIRAVTIDRVMSYLNAS

SEQ ID NO: 87 - protein, 760 aa, artificial
  Fc - IL-12 (P40-P35I-E79A/T80A) with knobs (ASKGC111_CX14_25_6)
DKTHTCPPCPAPELLGGPSVFLFPPKPKDTLMISRTPEVTCVVVDVSHEDPEVKFNWYVDGVEVHNAKTKPREEQYASTYRVVSVLTVLHQDWLNGKEYKCKVSNKALPAPIEKTISKAKGQPREPQVYTLPPCRDELTKNQVSLWCLVKGFYPSDIAVEWESNGQPENNYKTTPPVLDSDGSFFLYSKLTVDKSRWQQGNVFSCSVMHEALHNHYTQKSLSLSPGAGGGGSGGGGSGGGGSIWELKKDVYVVELDWYPDAPGEMVVLTCDTPEEDGITWTLDQSSEVLGSGKTLTIQVKEFGDAGQYTCHKGGEVLSHSLLLLHKKEDGIWSTDILKDQKEPKNKTFLRCEAKNYSGRFTCWWLTTISTDLTFSVKSSRGSSDPQGVTCGAATLSAERVRGDNKEYEYSVECQEDSACPAAEESLPIEVMVDAVHKLKYENYTSSFFIRDIIKPDPPKNLQLKPLKNSRQVEVSWEYPDTWSTPHSYFSLTFCVQVQGKSKREKKDRVFTDKTSATVICRKNASISVRAQDRYYSSSWSEWASVPCSGGGGSGGGGSGGGGSRNLPVATPDPGMFPCLHHSQNLLRAVSNMLQKARQTLEFYPCTSEEIDHEDITKDKTSTVEACLPLELTKNESCLNSRAASFITNGSCLASRKTSFMMALCLSSIYEDLKMYQVEFKTMNAKLLMDPKRQIFLDQNMLAVIDELMQALNFNSETVPQKSSLEEPDFYKTKIKLCILLHAFRIRAVTIDRVMSYLNAS

SEQ ID NO: 88 - protein, 760 aa, artificial
  Fc - IL-12 (P40-P35K-F82A) with knobs (ASKGC111_CX14_25_7)
DKTHTCPPCPAPELLGGPSVFLFPPKPKDTLMISRTPEVTCVVVDVSHEDPEVKFNWYVDGVEVHNAKTKPREEQYASTYRVVSVLTVLHQDWLNGKEYKCKVSNKALPAPIEKTISKAKGQPREPQVYTLPPCRDELTKNQVSLWCLVKGFYPSDIAVEWESNGQPENNYKTTPPVLDSDGSFFLYSKLTVDKSRWQQGNVFSCSVMHEALHNHYTQKSLSLSPGAGGGGSGGGGSGGGGSIWELKKDVYVVELDWYPDAPGEMVVLTCDTPEEDGITWTLDQSSEVLGSGKTLTIQVKEFGDAGQYTCHKGGEVLSHSLLLLHKKEDGIWSTDILKDQKEPKNKTFLRCEAKNYSGRFTCWWLTTISTDLTFSVKSSRGSSDPQGVTCGAATLSAERVRGDNKEYEYSVECQEDSACPAAEESLPIEVMVDAVHKLKYENYTSSFFIRDIIKPDPPKNLQLKPLKNSRQVEVSWEYPDTWSTPHSYFSLTFCVQVQGKSKREKKDRVFTDKTSATVICRKNASISVRAQDRYYSSSWSEWASVPCSGGGGSGGGGSGGGGSRNLPVATPDPGMFPCLHHSQNLLRAVSNMLQKARQTLEFYPCTSEEIDHEDITKDKTSTVEACLPLELTKNESCLNSRETSAITNGSCLASRKTSFMMALCLSSIYEDLKMYQVEFKTMNAKLLMDPKRQIFLDQNMLAVIDELMQALNFNSETVPQKSSLEEPDFYKTKIKLCILLHAFRIRAVTIDRVMSYLNAS

SEQ ID NO: 89 - protein, 760 aa, artificial
  Fc - IL-12 (P40-P35M-N71Q) with knobs (ASKGC111_CX14_25_8)
DKTHTCPPCPAPELLGGPSVFLFPPKPKDTLMISRTPEVTCVVVDVSHEDPEVKFNWYVDGVEVHNAKTKPREEQYASTYRVVSVLTVLHQDWLNGKEYKCKVSNKALPAPIEKTISKAKGQPREPQVYTLPPCRDELTKNQVSLWCLVKGFYPSDIAVEWESNGQPENNYKTTPPVLDSDGSFFLYSKLTVDKSRWQQGNVFSCSVMHEALHNHYTQKSLSLSPGAGGGGSGGGGSGGGGSIWELKKDVYVVELDWYPDAPGEMVVLTCDTPEEDGITWTLDQSSEVLGSGKTLTIQVKEFGDAGQYTCHKGGEVLSHSLLLLHKKEDGIWSTDILKDQKEPKNKTFLRCEAKNYSGRFTCWWLTTISTDLTFSVKSSRGSSDPQGVTCGAATLSAERVRGDNKEYEYSVECQEDSACPAAEESLPIEVMVDAVHKLKYENYTSSFFIRDIIKPDPPKNLQLKPLKNSRQVEVSWEYPDTWSTPHSYFSLTFCVQVQGKSKREKKDRVFTDKTSATVICRKNASISVRAQDRYYSSSWSEWASVPCSGGGGSGGGGSGGGGSRNLPVATPDPGMFPCLHHSQNLLRAVSNMLQKARQTLEFYPCTSEEIDHEDITKDKTSTVEACLPLELTKQESCLNSRETSFITNGSCLASRKTSFMMALCLSSIYEDLKMYQVEFKTMNAKLLMDPKRQIFLDQNMLAVIDELMQALNFNSETVPQKSSLEEPDFYKTKIKLCILLHAFRIRAVTIDRVMSYLNAS

SEQ ID NO: 90 - protein, 760 aa, artificial
  Fc - IL-12 (P40-P35B-F166K) with knobs mutations (ASKGC111_CX14_25_9)
DKTHTCPPCPAPELLGGPSVFLFPPKPKDTLMISRTPEVTCVVVDVSHEDPEVKFNWYVDGVEVHNAKTKPREEQYASTYRVVSVLTVLHQDWLNGKEYKCKVSNKALPAPIEKTISKAKGQPREPQVYTLPPCRDELTKNQVSLWCLVKGFYPSDIAVEWESNGQPENNYKTTPPVLDSDGSFFLYSKLTVDKSRWQQGNVFSCSVMHEALHNHYTQKSLSLSPGAGGGGSGGGGSGGGGSIWELKKDVYVVELDWYPDAPGEMVVLTCDTPEEDGITWTLDQSSEVLGSGKTLTIQVKEFGDAGQYTCHKGGEVLSHSLLLLHKKEDGIWSTDILKDQKEPKNKTFLRCEAKNYSGRFTCWWLTTISTDLTFSVKSSRGSSDPQGVTCGAATLSAERVRGDNKEYEYSVECQEDSACPAAEESLPIEVMVDAVHKLKYENYTSSFFIRDIIKPDPPKNLQLKPLKNSRQVEVSWEYPDTWSTPHSYFSLTFCVQVQGKSKREKKDRVFTDKTSATVICRKNASISVRAQDRYYSSSWSEWASVPCSGGGGSGGGGSGGGGSRNLPVATPDPGMFPCLHHSQNLLRAVSNMLQKARQTLEFYPCTSEEIDHEDITKDKTSTVEACLPLELTKNESCLNSRETSFITNGSCLASRKTSFMMALCLSSIYEDLKMYQVEFKTMNAKLLMDPKRQIFLDQNMLAVIDELMQALNFNSETVPQKSSLEEPDKYKTKIKLCILLHAFRIRAVTIDRVMSYLNAS

SEQ ID NO: 91 - protein, 760 aa, artificial
  Fc - IL-12 (P40-P35E-T43A/S44G) with knobs mutations (ASKGC111_CX14_25_11)
DKTHTCPPCPAPELLGGPSVFLFPPKPKDTLMISRTPEVTCVVVDVSHEDPEVKFNWYVDGVEVHNAKTKPREEQYASTYRVVSVLTVLHQDWLNGKEYKCKVSNKALPAPIEKTISKAKGQPREPQVYTLPPCRDELTKNQVSLWCLVKGFYPSDIAVEWESNGQPENNYKTTPPVLDSDGSFFLYSKLTVDKSRWQQGNVFSCSVMHEALHNHYTQKSLSLSPGAGGGGSGGGGSGGGGSIWELKKDVYVVELDWYPDAPGEMVVLTCDTPEEDGITWTLDQSSEVLGSGKTLTIQVKEFGDAGQYTCHKGGEVLSHSLLLLHKKEDGIWSTDILKDQKEPKNKTFLRCEAKNYSGRFTCWWLTTISTDLTFSVKSSRGSSDPQGVTCGAATLSAERVRGDNKEYEYSVECQEDSACPAAEESLPIEVMVDAVHKLKYENYTSSFFIRDIIKPDPPKNLQLKPLKNSRQVEVSWEYPDTWSTPHSYFSLTFCVQVQGKSKREKKDRVFTDKTSATVICRKNASISVRAQDRYYSSSWSEWASVPCSGGGGSGGGGSGGGGSRNLPVATPDPGMFPCLHHSQNLLRAVSNMLQKARQTLEFYPCAGEEIDHEDITKDKTSTVEACLPLELTKNESCLNSRETSFITNGSCLASRKTSFMMALCLSSIYEDLKMYQVEFKTMNAKLLMDPKRQIFLDQNMLAVIDELMQALNFNSETVPQKSSLEEPDFYKTKIKLCILLHAFRIRAVTIDRVMSYLNAS

SEQ ID NO: 92 - protein, 760 aa, artificial
  Fc - IL-12 (P40-P35H-E50A) with knobs mutations (ASKGC111_CX14_25_12)
DKTHTCPPCPAPELLGGPSVFLFPPKPKDTLMISRTPEVTCVVVDVSHEDPEVKFNWYVDGVEVHNAKTKPREEQYASTYRVVSVLTVLHQDWLNGKEYKCKVSNKALPAPIEKTISKAKGQPREPQVYTLPPCRDELTKNQVSLWCLVKGFYPSDIAVEWESNGQPENNYKTTPPVLDSDGSFFLYSKLTVDKSRWQQGNVFSCSVMHEALHNHYTQKSLSLSPGAGGGGSGGGGSGGGGSIWELKKDVYVVELDWYPDAPGEMVVLTCDTPEEDGITWTLDQSSEVLGSGKTLTIQVKEFGDAGQYTCHKGGEVLSHSLLLLHKKEDGIWSTDILKDQKEPKNKTFLRCEAKNYSGRFTCWWLTTISTDLTFSVKSSRGSSDPQGVTCGAATLSAERVRGDNKEYEYSVECQEDSACPAAEESLPIEVMVDAVHKLKYENYTSSFFIRDIIKPDPPKNLQLKPLKNSRQVEVSWEYPDTWSTPHSYFSLTFCVQVQGKSKREKKDRVFTDKTSATVICRKNASISVRAQDRYYSSSWSEWASVPCSGGGGSGGGGSGGGGSRNLPVATPDPGMFPCLHHSQNLLRAVSNMLQKARQTLEFYPCTSEEIDHADITKDKTSTVEACLPLELTKNESCLNSRETSFITNGSCLASRKTSFMMALCLSSIYEDLKMYQVEFKTMNAKLLMDPKRQIFLDQNMLAVIDELMQALNFNSETVPQKSSLEEPDFYKTKIKLCILLHAFRIRAVTIDRVMSYLNAS

SEQ ID NO: 93 - protein, 752 aa, artificial
  Fc - IL-12 (P40-P35) with knobs mutations P40 Deletion258-265 (ASKGD111_CX14_4_1)
DKTHTCPPCPAPELLGGPSVFLFPPKPKDTLMISRTPEVTCVVVDVSHEDPEVKFNWYVDGVEVHNAKTKPREEQYASTYRVVSVLTVLHQDWLNGKEYKCKVSNKALPAPIEKTISKAKGQPREPQVYTLPPCRDELTKNQVSLWCLVKGFYPSDIAVEWESNGQPENNYKTTPPVLDSDGSFFLYSKLTVDKSRWQQGNVFSCSVMHEALHNHYTQKSLSLSPGAGGGGSGGGGSGGGGSIWELKKDVYVVELDWYPDAPGEMVVLTCDTPEEDGITWTLDQSSEVLGSGKTLTIQVKEFGDAGQYTCHKGGEVLSHSLLLLHKKEDGIWSTDILKDQKEPKNKTFLRCEAKNYSGRFTCWWLTTISTDLTFSVKSSRGSSDPQGVTCGAATLSAERVRGDNKEYEYSVECQEDSACPAAEESLPIEVMVDAVHKLKYENYTSSFFIRDIIKPDPPKNLQLKPLKNSRQVEVSWEYPDTWSTPHSYFSLTFCVQVQGRVFTDKTSATVICRKNASISVRAQDRYYSSSWSEWASVPCSGGGGSGGGGSGGGGSRNLPVATPDPGMFPCLHHSQNLLRAVSNMLQKARQTLEFYPCTSEEIDHEDITKDKTSTVEACLPLELTKNESCLNSRETSFITNGSCLASRKTSFMMALCLSSIYEDLKMYQVEFKTMNAKLLMDPKRQIFLDQNMLAVIDELMQALNFNSETVPQKSSLEEPDFYKTKIKLCILLHAFRIRAVTIDRVMSYLNAS

SEQ ID NO: 94 - protein, 757 aa, artificial
  - Fc - IL-12 (P40-P35) with knobs mutations P40v1 (ASKGD111_CX14_4_2)
DKTHTCPPCPAPELLGGPSVFLFPPKPKDTLMISRTPEVTCVVVDVSHEDPEVKFNWYVDGVEVHNAKTKPREEQYASTYRVVSVLTVLHQDWLNGKEYKCKVSNKALPAPIEKTISKAKGQPREPQVYTLPPCRDELTKNQVSLWCLVKGFYPSDIAVEWESNGQPENNYKTTPPVLDSDGSFFLYSKLTVDKSRWQQGNVFSCSVMHEALHNHYTQKSLSLSPGAGGGGSGGGGSGGGGSIWELKKDVYVVELDWYPDAPGEMVVLTCDTPEEDGITWTLDQSSEVLGSGKTLTIQVKEFGDAGQYTCHKGGEVLSHSLLLLHKKEDGIWSTDILKDQKEPKNKTFLRCEAKNYSGRFTCWWLTTISTDLTFSVKSSRGSSDPQGVTCGAATLSAERVRGDNKEYEYSVECQEDSACPAAEESLPIEVMVDAVHKLKYENYTSSFFIRDIIKPDPPKNLQLKPLKNSRQVEVSWEYPDTWSTPHSYFSLTFCVQVQGKDNTERVFTDKTSATVICRKNASISVRAQDRYYSSSWSEWASVPCSGGGGSGGGGSGGGGSRNLPVATPDPGMFPCLHHSQNLLRAVSNMLQKARQTLEFYPCTSEEIDHEDITKDKTSTVEACLPLELTKNESCLNSRETSFITNGSCLASRKTSFMMALCLSSIYEDLKMYQVEFKTMNAKLLMDPKRQIFLDQNMLAVIDELMQALNFNSETVPQKSSLEEPDFYKTKIKLCILLHAFRIRAVTIDRVMSYLNAS

SEQ ID NO: 95 - protein, 760 aa, artificial
  Fc - IL-12 (P40-P35) with knobs mutations P40v3 (ASKGD111_CX14_4_3)
DKTHTCPPCPAPELLGGPSVFLFPPKPKDTLMISRTPEVTCVVVDVSHEDPEVKFNWYVDGVEVHNAKTKPREEQYASTYRVVSVLTVLHQDWLNGKEYKCKVSNKALPAPIEKTISKAKGQPREPQVYTLPPCRDELTKNQVSLWCLVKGFYPSDIAVEWESNGQPENNYKTTPPVLDSDGSFFLYSKLTVDKSRWQQGNVFSCSVMHEALHNHYTQKSLSLSPGAGGGGSGGGGSGGGGSIWELKKDVYVVELDWYPDAPGEMVVLTCDTPEEDGITWTLDQSSEVLGSGKTLTIQVKEFGDAGQYTCHKGGEVLSHSLLLLHKKEDGIWSTDILKDQKEPKNKTFLRCEAKNYSGRFTCWWLTTISTDLTFSVKSSRGSSDPQGVTCGAATLSAERVRGDNKEYEYSVECQEDSACPAAEESLPIEVMVDAVHKLKYENYTSSFFIRDIIKPDPPKNLQLKPLKNSRQVEVSWEYPDTWSTPHSYFSLTFCVQVQGQDQDEKKDRVFTDKTSATVICRKNASISVRAQDRYYSSSWSEWASVPCSGGGGSGGGGSGGGGSRNLPVATPDPGMFPCLHHSQNLLRAVSNMLQKARQTLEFYPCTSEEIDHEDITKDKTSTVEACLPLELTKNESCLNSRETSFITNGSCLASRKTSFMMALCLSSIYEDLKMYQVEFKTMNAKLLMDPKRQIFLDQNMLAVIDELMQALNFNSETVPQKSSLEEPDFYKTKIKLCILLHAFRIRAVTIDRVMSYLNAS

SEQ ID NO: 96 - protein, 760 aa, artificial; identical to SEQ ID NO: 51
  Fc - IL-12 (P40-P35) with knobs mutations P40v6_AA mutation (ASKGD111_CX14_4_4)

SEQ ID NO: 97 - protein, 494 aa, artificial
  scFV which binds to IL-12-VL-VH-4linker (ASKGD111_CX5_47_4)
DKTHTCPPCPAPELLGGPSVFLFPPKPKDTLMISRTPEVTCVVVDVSHEDPEVKFNWYVDGVEVHNAKTKPREEQYNSTYRVVSVLTVLHQDWLNGKEYKCKVSNKALPAPIEKTISKAKGQPREPQVCTLPPSRDELTKNQVSLSCAVKGFYPSDIAVEWESNGQPENNYKTTPPVLDSDGSFFLVSKLTVDKSRWQQGNVFSCSVMHEALHNHYTQKSLSLSPGKGGGGSGGGGSGPLGVRGGGGSDIQMTQSPSSLSASVGDRVTITCRASQGISSWLAWYQQKPEKAPKSLIYAASSLQSGVPSRFSGSGSGTDFTLTISSLQPEDFATYYCQQYNIYPYTFGQGTKLEIKGGGGSGGGGSGGGGSGGGGSEVQLVQSGAEVKKPGESLKISCKGSGYSFTTYWLGWVRQMPGKGLDWIGIMSPVDSDIRYSPSFQGQVTMSVDKSITTAYLQWNSLKASDTAMYYCARRRPGQGYFDFWGQGTLVTVSS

SEQ ID NO: 98 - protein, 298 aa, artificial
  P40 subunit of IL-12
IWELKKDVYVVELDWYPDAPGEMVVLTCDTPEEDGITWTLDQSSEVLGSGKTLTIQVKEFGDAGQYTCHKGGEVLSHSLLLLHKKEDGIWSTDILKDQKEPKNKTFLRCEAKNYSGRFTCWWLTTISTDLTFSVKSSRGSSDPQGVTCGAATLSAERVRGDNKEYEYSVECQEDSACPAAEESLPIEVMVDAVHKLKYENYTSSFFIRDIIKPDPPKNLQLKPLKNSRQVEVSWEYPDTWSTPHSYFSLTFCVQVQGRVFTDKTSATVICRKNASISVRAQDRYYSSSWSEWASVPCS

SEQ ID NO: 99 - protein, 760 aa, artificial
  Fc - IL-12 (P40-P35C-E38A/F39A) with knobs mutations (ASKGC111_CX14_25_10)
DKTHTCPPCPAPELLGGPSVFLFPPKPKDTLMISRTPEVTCVVVDVSHEDPEVKFNWYVDGVEVHNAKTKPREEQYASTYRVVSVLTVLHQDWLNGKEYKCKVSNKALPAPIEKTISKAKGQPREPQVYTLPPCRDELTKNQVSLWCLVKGFYPSDIAVEWESNGQPENNYKTTPPVLDSDGSFFLYSKLTVDKSRWQQGNVFSCSVMHEALHNHYTQKSLSLSPGAGGGGSGGGGSGGGGSIWELKKDVYVVELDWYPDAPGEMVVLTCDTPEEDGITWTLDQSSEVLGSGKTLTIQVKEFGDAGQYTCHKGGEVLSHSLLLLHKKEDGIWSTDILKDQKEPKNKTFLRCEAKNYSGRFTCWWLTTISTDLTFSVKSSRGSSDPQGVTCGAATLSAERVRGDNKEYEYSVECQEDSACPAAEESLPIEVMVDAVHKLKYENYTSSFFIRDIIKPDPPKNLQLKPLKNSRQVEVSWEYPDTWSTPHSYFSLTFCVQVQGKSKREKKDRVFTDKTSATVICRKNASISVRAQDRYYSSSWSEWASVPCSGGGGSGGGGSGGGGSRNLPVATPDPGMFPCLHHSQNLLRAVSNMLQKARQTLAAYPCTSEEIDHEDITKDKTSTVEACLPLELTKNESCLNSRETSFITNGSCLASRKTSFMMALCLSSIYEDLKMYQVEFKTMNAKLLMDPKRQIFLDQNMLAVIDELMQALNFNSETVPQKSSLEEPDFYKTKIKLCILLHAFRIRAVTIDRVMSYLNAS

SEQ ID NO: 100 - protein, 227 aa, artificial
  Fc Pembrolizumab
DKTHTCPPCPAPELLGGPSVFLFPPKPKDTLMISRTPEVTCVVVDVSHEDPEVKFNWYVDGVEVHNAKTKPREEQYNSTYRVVSVLTVLHQDWLNGKEYKCKVSNKALPAPIEKTISKAKGQPREPQVCTLPPSRDELTKNQVSLSCAVKGFYPSDIAVEWESNGQPENNYKTTPPVLDSDGSFFLVSKLTVDKSRWQQGNVFSCSVMHEALHNHYTQKSLSLSPGK

SEQ ID NO: 101 - protein, 120 aa, artificial [sequence omitted]

SEQ ID NO: 102 - protein, 111 aa, artificial [sequence omitted]

SEQ ID NO: 103 - protein, 1011 aa, artificial
  Seq1-scFv-PD1-HC-LALA, G237A, IL-12wt Knob (ASKG129_CX14_100_1)
EIVLTQSPATLSLSPGERATLSCRASKGVSTSGYSYLHWYQQKPGQAPRLLIYLASYLESGVPARFSGSGSGTDFTLTISSLEPEDFAVYYCQHSRDLPLTFGGGTKVEIKGGGGSGGGGSGGGGSQVQLVQSGVEVKKPGASVKVSCKASGYTFTNYYMYWVRQAPGQGLEWMGGINPSNGGTNFNEKFKNRVTLTTDSSTTTAYMELKSLQFDDTAVYYCARRDYRFDMGFDYWGQGTTVTVSSGSEPKSSDKTHTCPPCPAPEAAGAPSVFLFPPKPKDTLYITREPEVTCVVVDVSHEDPEVKFNWYVDGVEVHNAKTKPREEQYNSTYRVVSVLTVLHQDWLNGKEYKCKVSNKALPAPIEKTISKAKGQPREPQVYTLPPCREEMTKNQVSLWCLVKGFYPSDIAVEWESNGQPENNYKTTPPVLDSDGSFFLYSKLTVDKSRWQQGNVFSCSVMHEALHNHYTQKSLSLSPGGGGSGGGGSGGGGSIWELKKDVYVVELDWYPDAPGEMVVLTCDTPEEDGITWTLDQSSEVLGSGKTLTIQVKEFGDAGQYTCHKGGEVLSHSLLLLHKKEDGIWSTDILKDQKEPKNKTFLRCEAKNYSGRFTCWWLTTISTDLTFSVKSSRGSSDPQGVTCGAATLSAERVRGDNKEYEYSVECQEDSACPAAEESLPIEVMVDAVHKLKYENYTSSFFIRDIIKPDPPKNLQLKPLKNSRQVEVSWEYPDTWSTPHSYFSLTFCVQVQGKSKREKKDRVFTDKTSATVICRKNASISVRAQDRYYSSSWSEWASVPCSGGGGSGGGGSGGGGSRNLPVATPDPGMFPCLHHSQNLLRAVSNMLQKARQTLEFYPCTSEEIDHEDITKDKTSTVEACLPLELTKNESCLNSRETSFITNGSCLASRKTSFMMALCLSSIYEDLKMYQVEFKTMNAKLLMDPKRQIFLDQNMLAVIDELMQALNFNSETVPQKSSLEEPDFYKTKIKLCILLHAFRIRAVTIDRVMSYLNAS

SEQ ID NO: 104 - protein, 1011 aa, artificial
  Seq2- scFv-PD1-HC-LALA, G237A, IL-12-P35Y40A-Knob (ASKG129_CX14_100_2)
EIVLTQSPATLSLSPGERATLSCRASKGVSTSGYSYLHWYQQKPGQAPRLLIYLASYLESGVPARFSGSGSGTDFTLTISSLEPEDFAVYYCQHSRDLPLTFGGGTKVEIKGGGGSGGGGSGGGGSQVQLVQSGVEVKKPGASVKVSCKASGYTFTNYYMYWVRQAPGQGLEWMGGINPSNGGTNFNEKFKNRVTLTTDSSTTTAYMELKSLQFDDTAVYYCARRDYRFDMGFDYWGQGTTVTVSSGSEPKSSDKTHTCPPCPAPEAAGAPSVFLFPPKPKDTLYITREPEVTCVVVDVSHEDPEVKFNWYVDGVEVHNAKTKPREEQYNSTYRVVSVLTVLHQDWLNGKEYKCKVSNKALPAPIEKTISKAKGQPREPQVYTLPPCREEMTKNQVSLWCLVKGFYPSDIAVEWESNGQPENNYKTTPPVLDSDGSFFLYSKLTVDKSRWQQGNVFSCSVMHEALHNHYTQKSLSLSPGGGGSGGGGSGGGGSIWELKKDVYVVELDWYPDAPGEMVVLTCDTPEEDGITWTLDQSSEVLGSGKTLTIQVKEFGDAGQYTCHKGGEVLSHSLLLLHKKEDGIWSTDILKDQKEPKNKTFLRCEAKNYSGRFTCWWLTTISTDLTFSVKSSRGSSDPQGVTCGAATLSAERVRGDNKEYEYSVECQEDSACPAAEESLPIEVMVDAVHKLKYENYTSSFFIRDIIKPDPPKNLQLKPLKNSRQVEVSWEYPDTWSTPHSYFSLTFCVQVQGKSKREKKDRVFTDKTSATVICRKNASISVRAQDRYYSSSWSEWASVPCSGGGGSGGGGSGGGGSRNLPVATPDPGMFPCLHHSQNLLRAVSNMLQKARQTLEFAPCTSEEIDHEDITKDKTSTVEACLPLELTKNESCLNSRETSFITNGSCLASRKTSFMMALCLSSIYEDLKMYQVEFKTMNAKLLMDPKRQIFLDQNMLAVIDELMQALNFNSETVPQKSSLEEPDFYKTKIKLCILLHAFRIRAVTIDRVMSYLNAS

SEQ ID NO: 105 - protein, 1011 aa, artificial
  Seq3- scFv-PD1-HC-LALA, G237A, IL-12-P40AA-knob (ASKG129_CX14_100_3)
EIVLTQSPATLSLSPGERATLSCRASKGVSTSGYSYLHWYQQKPGQAPRLLIYLASYLESGVPARFSGSGSGTDFTLTISSLEPEDFAVYYCQHSRDLPLTFGGGTKVEIKGGGGSGGGGSGGGGSQVQLVQSGVEVKKPGASVKVSCKASGYTFTNYYMYWVRQAPGQGLEWMGGINPSNGGTNFNEKFKNRVTLTTDSSTTTAYMELKSLQFDDTAVYYCARRDYRFDMGFDYWGQGTTVTVSSGSEPKSSDKTHTCPPCPAPEAAGAPSVFLFPPKPKDTLYITREPEVTCVVVDVSHEDPEVKFNWYVDGVEVHNAKTKPREEQYNSTYRVVSVLTVLHQDWLNGKEYKCKVSNKALPAPIEKTISKAKGQPREPQVYTLPPCREEMTKNQVSLWCLVKGFYPSDIAVEWESNGQPENNYKTTPPVLDSDGSFFLYSKLTVDKSRWQQGNVFSCSVMHEALHNHYTQKSLSLSPGGGGSGGGGSGGGGSIWELKKDVYVVELDWYPDAPGEMVVLTCDTPEEDGITWTLDQSSEVLGSGKTLTIQVKEFGDAGQYTCHKGGEVLSHSLLLLHKKEDGIWSTDILKDQKEPKNKTFLRCEAKNYSGRFTCWWLTTISTDLTFSVKSSRGSSDPQGVTCGAATLSAERVRGDNKEYEYSVECQEDSACPAAEESLPIEVMVDAVHKLKYENYTSSFFIRDIIKPDPPKNLQLKPLKNSRQVEVSWEYPDTWSTPHSYFSLTFCVQVQGKSAAEKKDRVFTDKTSATVICRKNASISVRAQDRYYSSSWSEWASVPCSGGGGSGGGGSGGGGSRNLPVATPDPGMFPCLHHSQNLLRAVSNMLQKARQTLEFYPCTSEEIDHEDITKDKTSTVEACLPLELTKNESCLNSRETSFITNGSCLASRKTSFMMALCLSSIYEDLKMYQVEFKTMNAKLLMDPKRQIFLDQNMLAVIDELMQALNFNSETVPQKSSLEEPDFYKTKIKLCILLHAFRIRAVTIDRVMSYLNAS

SEQ ID NO: 106 - protein, 1006 aa, artificial
  Seq1-scFv-PD1-HC-LALA, G237A, IL-12wt Knob; short linker
EIVLTQSPATLSLSPGERATLSCRASKGVSTSGYSYLHWYQQKPGQAPRLLIYLASYLESGVPARFSGSGSGTDFTLTISSLEPEDFAVYYCQHSRDLPLTFGGGTKVEIKGGGGSGGGGSGGGGSQVQLVQSGVEVKKPGASVKVSCKASGYTFTNYYMYWVRQAPGQGLEWMGGINPSNGGTNFNEKFKNRVTLTTDSSTTTAYMELKSLQFDDTAVYYCARRDYRFDMGFDYWGQGTTVTVSSGSEPKSSDKTHTCPPCPAPEAAGAPSVFLFPPKPKDTLYITREPEVTCVVVDVSHEDPEVKFNWYVDGVEVHNAKTKPREEQYNSTYRVVSVLTVLHQDWLNGKEYKCKVSNKALPAPIEKTISKAKGQPREPQVYTLPPCREEMTKNQVSLWCLVKGFYPSDIAVEWESNGQPENNYKTTPPVLDSDGSFFLYSKLTVDKSRWQQGNVFSCSVMHEALHNHYTQKSLSLSPGGGGSGGGGSGGGGSIWELKKDVYVVELDWYPDAPGEMVVLTCDTPEEDGITWTLDQSSEVLGSGKTLTIQVKEFGDAGQYTCHKGGEVLSHSLLLLHKKEDGIWSTDILKDQKEPKNKTFLRCEAKNYSGRFTCWWLTTISTDLTFSVKSSRGSSDPQGVTCGAATLSAERVRGDNKEYEYSVECQEDSACPAAEESLPIEVMVDAVHKLKYENYTSSFFIRDIIKPDPPKNLQLKPLKNSRQVEVSWEYPDTWSTPHSYFSLTFCVQVQGKSKREKKDRVFTDKTSATVICRKNASISVRAQDRYYSSSWSEWASVPCSGGGGSGGGGSRNLPVATPDPGMFPCLHHSQNLLRAVSNMLQKARQTLEFYPCTSEEIDHEDITKDKTSTVEACLPLELTKNESCLNSRETSFITNGSCLASRKTSFMMALCLSSIYEDLKMYQVEFKTMNAKLLMDPKRQIFLDQNMLAVIDELMQALNFNSETVPQKSSLEEPDFYKTKIKLCILLHAFRIRAVTIDRVMSYLNAS

SEQ ID NO: 107 - protein, 1006 aa, artificial
  Seq2- scFv-PD1-HC-LALA, G237A, IL-12-P35Y40A-Knob (ASKG129_CX14_100_2)
EIVLTQSPATLSLSPGERATLSCRASKGVSTSGYSYLHWYQQKPGQAPRLLIYLASYLESGVPARFSGSGSGTDFTLTISSLEPEDFAVYYCQHSRDLPLTFGGGTKVEIKGGGGSGGGGSGGGGSQVQLVQSGVEVKKPGASVKVSCKASGYTFTNYYMYWVRQAPGQGLEWMGGINPSNGGTNFNEKFKNRVTLTTDSSTTTAYMELKSLQFDDTAVYYCARRDYRFDMGFDYWGQGTTVTVSSGSEPKSSDKTHTCPPCPAPEAAGAPSVFLFPPKPKDTLYITREPEVTCVVVDVSHEDPEVKFNWYVDGVEVHNAKTKPREEQYNSTYRVVSVLTVLHQDWLNGKEYKCKVSNKALPAPIEKTISKAKGQPREPQVYTLPPCREEMTKNQVSLWCLVKGFYPSDIAVEWESNGQPENNYKTTPPVLDSDGSFFLYSKLTVDKSRWQQGNVFSCSVMHEALHNHYTQKSLSLSPGGGGSGGGGSGGGGSIWELKKDVYVVELDWYPDAPGEMVVLTCDTPEEDGITWTLDQSSEVLGSGKTLTIQVKEFGDAGQYTCHKGGEVLSHSLLLLHKKEDGIWSTDILKDQKEPKNKTFLRCEAKNYSGRFTCWWLTTISTDLTFSVKSSRGSSDPQGVTCGAATLSAERVRGDNKEYEYSVECQEDSACPAAEESLPIEVMVDAVHKLKYENYTSSFFIRDIIKPDPPKNLQLKPLKNSRQVEVSWEYPDTWSTPHSYFSLTFCVQVQGKSKREKKDRVFTDKTSATVICRKNASISVRAQDRYYSSSWSEWASVPCSGGGGSGGGGSRNLPVATPDPGMFPCLHHSQNLLRAVSNMLQKARQTLEFAPCTSEEIDHEDITKDKTSTVEACLPLELTKNESCLNSRETSFITNGSCLASRKTSFMMALCLSSIYEDLKMYQVEFKTMNAKLLMDPKRQIFLDQNMLAVIDELMQALNFNSETVPQKSSLEEPDFYKTKIKLCILLHAFRIRAVTIDRVMSYLNAS

SEQ ID NO: 108 - protein, 1006 aa, artificial
  Seq3- scFv-PD1-HC-LALA, G237A, IL-12-P40AA-knob (ASKG129_CX14_100_3)
EIVLTQSPATLSLSPGERATLSCRASKGVSTSGYSYLHWYQQKPGQAPRLLIYLASYLESGVPARFSGSGSGTDFTLTISSLEPEDFAVYYCQHSRDLPLTFGGGTKVEIKGGGGSGGGGSGGGGSQVQLVQSGVEVKKPGASVKVSCKASGYTFTNYYMYWVRQAPGQGLEWMGGINPSNGGTNFNEKFKNRVTLTTDSSTTTAYMELKSLQFDDTAVYYCARRDYRFDMGFDYWGQGTTVTVSSGSEPKSSDKTHTCPPCPAPEAAGAPSVFLFPPKPKDTLYITREPEVTCVVVDVSHEDPEVKFNWYVDGVEVHNAKTKPREEQYNSTYRVVSVLTVLHQDWLNGKEYKCKVSNKALPAPIEKTISKAKGQPREPQVYTLPPCREEMTKNQVSLWCLVKGFYPSDIAVEWESNGQPENNYKTTPPVLDSDGSFFLYSKLTVDKSRWQQGNVFSCSVMHEALHNHYTQKSLSLSPGGGGSGGGGSGGGGSIWELKKDVYVVELDWYPDAPGEMVVLTCDTPEEDGITWTLDQSSEVLGSGKTLTIQVKEFGDAGQYTCHKGGEVLSHSLLLLHKKEDGIWSTDILKDQKEPKNKTFLRCEAKNYSGRFTCWWLTTISTDLTFSVKSSRGSSDPQGVTCGAATLSAERVRGDNKEYEYSVECQEDSACPAAEESLPIEVMVDAVHKLKYENYTSSFFIRDIIKPDPPKNLQLKPLKNSRQVEVSWEYPDTWSTPHSYFSLTFCVQVQGKSAAEKKDRVFTDKTSATVICRKNASISVRAQDRYYSSSWSEWASVPCSGGGGSGGGGSRNLPVATPDPGMFPCLHHSQNLLRAVSNMLQKARQTLEFYPCTSEEIDHEDITKDKTSTVEACLPLELTKNESCLNSRETSFITNGSCLASRKTSFMMALCLSSIYEDLKMYQVEFKTMNAKLLMDPKRQIFLDQNMLAVIDELMQALNFNSETVPQKSSLEEPDFYKTKIKLCILLHAFRIRAVTIDRVMSYLNAS

SEQ ID NO: 109 - protein, 742 aa, artificial
  Seq4- scFv-PD1-HC-LALA, G237A- mask-hole (ASKG129_CX14_100_4)
EIVLTQSPATLSLSPGERATLSCRASKGVSTSGYSYLHWYQQKPGQAPRLLIYLASYLESGVPARFSGSGSGTDFTLTISSLEPEDFAVYYCQHSRDLPLTFGGGTKVEIKGGGGSGGGGSGGGGSQVQLVQSGVEVKKPGASVKVSCKASGYTFTNYYMYWVRQAPGQGLEWMGGINPSNGGTNFNEKFKNRVTLTTDSSTTTAYMELKSLQFDDTAVYYCARRDYRFDMGFDYWGQGTTVTVSSGSEPKSSDKTHTCPPCPAPEAAGAPSVFLFPPKPKDTLYITREPEVTCVVVDVSHEDPEVKFNWYVDGVEVHNAKTKPREEQYNSTYRVVSVLTVLHQDWLNGKEYKCKVSNKALPAPIEKTISKAKGQPREPQVCTLPPSREEMTKNQVSLSCAVKGFYPSDIAVEWESNGQPENNYKTTPPVLDSDGSFFLVSKLTVDKSRWQQGNVFSCSVMHEALHNHYTQKSLSLSPGGGGSGGGGSAAGGGGSGGGGSDIQMTQSPSSLSASVGDRVTITCRASQGISSWLAWYQQKPEKAPKSLIYAASSLQSGVPSRFSGSGSGTDFTLTISSLQPEDFATYYCQQYNIYPYTFGQGTKLEIKSGGGGSGGGGSGGGGSEVQLVQSGAEVKKPGESLKISCKGSGYSFTTYWLGWVRQMPGKGLDWIGIMSPVDSDIRYSPSFQGQVTMSVDKSITTAYLQWNSLKASDTAMYYCARRRPGQGYFDFWGQGTLVTVSS

SEQ ID NO: 110 - protein, 725 aa, artificial
  Seq4- scFv-PD1-HC-LALA, G237A- mask-hole (ASKG129_CX14_100_4); short linker
  variant (479)..(483): sequence from positions 479 to 483 may be absent or present in 1-3 copies (n=0, 1, 2 or 3)
EIVLTQSPATLSLSPGERATLSCRASKGVSTSGYSYLHWYQQKPGQAPRLLIYLASYLESGVPARFSGSGSGTDFTLTISSLEPEDFAVYYCQHSRDLPLTFGGGTKVEIKGGGGSGGGGSGGGGSQVQLVQSGVEVKKPGASVKVSCKASGYTFTNYYMYWVRQAPGQGLEWMGGINPSNGGTNFNEKFKNRVTLTTDSSTTTAYMELKSLQFDDTAVYYCARRDYRFDMGFDYWGQGTTVTVSSGSEPKSSDKTHTCPPCPAPEAAGAPSVFLFPPKPKDTLYITREPEVTCVVVDVSHEDPEVKFNWYVDGVEVHNAKTKPREEQYNSTYRVVSVLTVLHQDWLNGKEYKCKVSNKALPAPIEKTISKAKGQPREPQVCTLPPSREEMTKNQVSLSCAVKGFYPSDIAVEWESNGQPENNYKTTPPVLDSDGSFFLVSKLTVDKSRWQQGNVFSCSVMHEALHNHYTQKSLSLSPGGGGSDIQMTQSPSSLSASVGDRVTITCRASQGISSWLAWYQQKPEKAPKSLIYAASSLQSGVPSRFSGSGSGTDFTLTISSLQPEDFATYYCQQYNIYPYTFGQGTKLEIKSGGGGSGGGGSGGGGSEVQLVQSGAEVKKPGESLKISCKGSGYSFTTYWLGWVRQMPGKGLDWIGIMSPVDSDIRYSPSFQGQVTMSVDKSITTAYLQWNSLKASDTAMYYCARRRPGQGYFDFWGQGTLVTVSS

SEQ ID NO: 111 - protein, 611 aa, artificial
  LAG3-IGG1-YTE-LALA- scFv-U non clv _ 3xG4S (ASKG129_CX14_72_1)
EVQLVESGGGLVQPGGSLRLSCAASGYTVSSYCMGWFRQAPGKGREGVSAIDSDGSVSYADSVKGRFTISKDNSKNTLYLQMNSLRAEDTAVYFCAADLCWVDQDQGEYNTWGQGTLVTVSSGSEPKSSDKTHTCPPCPAPEAAGGPSVFLFPPKPKDTLYITREPEVTCVVVDVSHEDPEVKFNWYVDGVEVHNAKTKPREEQYNSTYRVVSVLTVLHQDWLNGKEYKCKVSNKALPAPIEKTISKAKGQPREPQVYTLPPSREEMTKNQVSLTCLVKGFYPSDIAVEWESNGQPENNYKTTPPVLDSDGSFFLYSKLTVDKSRWQQGNVFSCSVMHEALHNHYTQKSLSLSPGGSAAGGGGSGGGGSDIQMTQSPSSLSASVGDRVTITCRASQGISSWLAWYQQKPEKAPKSLIYAASSLQSGVPSRFSGSGSGTDFTLTISSLQPEDFATYYCQQYNIYPYTFGQGTKLEIKSGGGGSGGGGSGGGGSEVQLVQSGAEVKKPGESLKISCKGSGYSFTTYWLGWVRQMPGKGLDWIGIMSPVDSDIRYSPSFQGQVTMSVDKSITTAYLQWNSLKASDTAMYYCARRRPGQGYFDFWGQGTLVTVSS

SEQ ID NO: 112 - protein, 606 aa, artificial
  LAG3-IGG1-YTE-LALA- scFv-U non clv _2xG4S (ASKG129_CX14_72_2)
EVQLVESGGGLVQPGGSLRLSCAASGYTVSSYCMGWFRQAPGKGREGVSAIDSDGSVSYADSVKGRFTISKDNSKNTLYLQMNSLRAEDTAVYFCAADLCWVDQDQGEYNTWGQGTLVTVSSGSEPKSSDKTHTCPPCPAPEAAGGPSVFLFPPKPKDTLYITREPEVTCVVVDVSHEDPEVKFNWYVDGVEVHNAKTKPREEQYNSTYRVVSVLTVLHQDWLNGKEYKCKVSNKALPAPIEKTISKAKGQPREPQVYTLPPSREEMTKNQVSLTCLVKGFYPSDIAVEWESNGQPENNYKTTPPVLDSDGSFFLYSKLTVDKSRWQQGNVFSCSVMHEALHNHYTQKSLSLSPGGGGSGGGGSDIQMTQSPSSLSASVGDRVTITCRASQGISSWLAWYQQKPEKAPKSLIYAASSLQSGVPSRFSGSGSGTDFTLTISSLQPEDFATYYCQQYNIYPYTFGQGTKLEIKSGGGGSGGGGSGGGGSEVQLVQSGAEVKKPGESLKISCKGSGYSFTTYWLGWVRQMPGKGLDWIGIMSPVDSDIRYSPSFQGQVTMSVDKSITTAYLQWNSLKASDTAMYYCARRRPGQGYFDFWGQGTLVTVSS

SEQ ID NO: 113 - protein, 601 aa, artificial
  LAG3-IGG1-YTE-LALA- scFv-U non clv _1xG4S (ASKG129_CX14_72_3)
EVQLVESGGGLVQPGGSLRLSCAASGYTVSSYCMGWFRQAPGKGREGVSAIDSDGSVSYADSVKGRFTISKDNSKNTLYLQMNSLRAEDTAVYFCAADLCWVDQDQGEYNTWGQGTLVTVSSGSEPKSSDKTHTCPPCPAPEAAGGPSVFLFPPKPKDTLYITREPEVTCVVVDVSHEDPEVKFNWYVDGVEVHNAKTKPREEQYNSTYRVVSVLTVLHQDWLNGKEYKCKVSNKALPAPIEKTISKAKGQPREPQVYTLPPSREEMTKNQVSLTCLVKGFYPSDIAVEWESNGQPENNYKTTPPVLDSDGSFFLYSKLTVDKSRWQQGNVFSCSVMHEALHNHYTQKSLSLSPGGGGSDIQMTQSPSSLSASVGDRVTITCRASQGISSWLAWYQQKPEKAPKSLIYAASSLQSGVPSRFSGSGSGTDFTLTISSLQPEDFATYYCQQYNIYPYTFGQGTKLEIKSGGGGSGGGGSGGGGSEVQLVQSGAEVKKPGESLKISCKGSGYSFTTYWLGWVRQMPGKGLDWIGIMSPVDSDIRYSPSFQGQVTMSVDKSITTAYLQWNSLKASDTAMYYCARRRPGQGYFDFWGQGTLVTVSS

SEQ ID NO: 114 - protein, 596 aa, artificial
  LAG3-IGG1-YTE-LALA- scFv-U non clv _0xG4S (ASKG129_CX14_72_4)
EVQLVESGGGLVQPGGSLRLSCAASGYTVSSYCMGWFRQAPGKGREGVSAIDSDGSVSYADSVKGRFTISKDNSKNTLYLQMNSLRAEDTAVYFCAADLCWVDQDQGEYNTWGQGTLVTVSSGSEPKSSDKTHTCPPCPAPEAAGGPSVFLFPPKPKDTLYITREPEVTCVVVDVSHEDPEVKFNWYVDGVEVHNAKTKPREEQYNSTYRVVSVLTVLHQDWLNGKEYKCKVSNKALPAPIEKTISKAKGQPREPQVYTLPPSREEMTKNQVSLTCLVKGFYPSDIAVEWESNGQPENNYKTTPPVLDSDGSFFLYSKLTVDKSRWQQGNVFSCSVMHEALHNHYTQKSLSLSPDIQMTQSPSSLSASVGDRVTITCRASQGISSWLAWYQQKPEKAPKSLIYAASSLQSGVPSRFSGSGSGTDFTLTISSLQPEDFATYYCQQYNIYPYTFGQGTKLEIKSGGGGSGGGGSGGGGSEVQLVQSGAEVKKPGESLKISCKGSGYSFTTYWLGWVRQMPGKGLDWIGIMSPVDSDIRYSPSFQGQVTMSVDKSITTAYLQWNSLKASDTAMYYCARRRPGQGYFDFWGQGTLVTVSS

SEQ ID NO: 115 - protein, 618 aa, artificial
  LAG3-IGG1-YTE-LALA- scFv-U non clv _ 4xG4S (ASKG129_CX14_51_1)
EVQLVESGGGLVQPGGSLRLSCAASGYTVSSYCMGWFRQAPGKGREGVSAIDSDGSVSYADSVKGRFTISKDNSKNTLYLQMNSLRAEDTAVYFCAADLCWVDQDQGEYNTWGQGTLVTVSSGSEPKSSDKTHTCPPCPAPEAAGGPSVFLFPPKPKDTLYITREPEVTCVVVDVSHEDPEVKFNWYVDGVEVHNAKTKPREEQYNSTYRVVSVLTVLHQDWLNGKEYKCKVSNKALPAPIEKTISKAKGQPREPQVYTLPPSREEMTKNQVSLTCLVKGFYPSDIAVEWESNGQPENNYKTTPPVLDSDGSFFLYSKLTVDKSRWQQGNVFSCSVMHEALHNHYTQKSLSLSPGGGGSGGGGSAAGGGGSGGGGSDIQMTQSPSSLSASVGDRVTITCRASQGISSWLAWYQQKPEKAPKSLIYAASSLQSGVPSRFSGSGSGTDFTLTISSLQPEDFATYYCQQYNIYPYTFGQGTKLEIKSGGGGSGGGGSGGGGSEVQLVQSGAEVKKPGESLKISCKGSGYSFTTYWLGWVRQMPGKGLDWIGIMSPVDSDIRYSPSFQGQVTMSVDKSITTAYLQWNSLKASDTAMYYCARRRPGQGYFDFWGQGTLVTVSS

SEQ ID NO: 116 - protein, 882 aa, artificial
  LAG3-IGG1-YTE-LALA-IL12P40AA_2xG4S (ASKG129_CX14_74_1)
EVQLVESGGGLVQPGGSLRLSCAASGYTVSSYCMGWFRQAPGKGREGVSAIDSDGSVSYADSVKGRFTISKDNSKNTLYLQMNSLRAEDTAVYFCAADLCWVDQDQGEYNTWGQGTLVTVSSGSEPKSSDKTHTCPPCPAPEAAGGPSVFLFPPKPKDTLYITREPEVTCVVVDVSHEDPEVKFNWYVDGVEVHNAKTKPREEQYNSTYRVVSVLTVLHQDWLNGKEYKCKVSNKALPAPIEKTISKAKGQPREPQVYTLPPSREEMTKNQVSLTCLVKGFYPSDIAVEWESNGQPENNYKTTPPVLDSDGSFFLYSKLTVDKSRWQQGNVFSCSVMHEALHNHYTQKSLSLSPGGGGSGGGGSGGGGSIWELKKDVYVVELDWYPDAPGEMVVLTCDTPEEDGITWTLDQSSEVLGSGKTLTIQVKEFGDAGQYTCHKGGEVLSHSLLLLHKKEDGIWSTDILKDQKEPKNKTFLRCEAKNYSGRFTCWWLTTISTDLTFSVKSSRGSSDPQGVTCGAATLSAERVRGDNKEYEYSVECQEDSACPAAEESLPIEVMVDAVHKLKYENYTSSFFIRDIIKPDPPKNLQLKPLKNSRQVEVSWEYPDTWSTPHSYFSLTFCVQVQGKSAAEKKDRVFTDKTSATVICRKNASISVRAQDRYYSSSWSEWASVPCSGGGGSGGGGSRNLPVATPDPGMFPCLHHSQNLLRAVSNMLQKARQTLEFYPCTSEEIDHEDITKDKTSTVEACLPLELTKNESCLNSRETSFITNGSCLASRKTSFMMALCLSSIYEDLKMYQVEFKTMNAKLLMDPKRQIFLDQNMLAVIDELMQALNFNSETVPQKSSLEEPDFYKTKIKLCILLHAFRIRAVTIDRVMSYLNAS

SEQ ID NO: 117 - protein, 877 aa, artificial
  LAG3-IGG1-YTE-LALA-IL12P40AA_1xG4S (ASKG129_CX14_74_2)
EVQLVESGGGLVQPGGSLRLSCAASGYTVSSYCMGWFRQAPGKGREGVSAIDSDGSVSYADSVKGRFTISKDNSKNTLYLQMNSLRAEDTAVYFCAADLCWVDQDQGEYNTWGQGTLVTVSSGSEPKSSDKTHTCPPCPAPEAAGGPSVFLFPPKPKDTLYITREPEVTCVVVDVSHEDPEVKFNWYVDGVEVHNAKTKPREEQYNSTYRVVSVLTVLHQDWLNGKEYKCKVSNKALPAPIEKTISKAKGQPREPQVYTLPPSREEMTKNQVSLTCLVKGFYPSDIAVEWESNGQPENNYKTTPPVLDSDGSFFLYSKLTVDKSRWQQGNVFSCSVMHEALHNHYTQKSLSLSPGGGGSGGGGSGGGGSIWELKKDVYVVELDWYPDAPGEMVVLTCDTPEEDGITWTLDQSSEVLGSGKTLTIQVKEFGDAGQYTCHKGGEVLSHSLLLLHKKEDGIWSTDILKDQKEPKNKTFLRCEAKNYSGRFTCWWLTTISTDLTFSVKSSRGSSDPQGVTCGAATLSAERVRGDNKEYEYSVECQEDSACPAAEESLPIEVMVDAVHKLKYENYTSSFFIRDIIKPDPPKNLQLKPLKNSRQVEVSWEYPDTWSTPHSYFSLTFCVQVQGKSAAEKKDRVFTDKTSATVICRKNASISVRAQDRYYSSSWSEWASVPCSGGGGSRNLPVATPDPGMFPCLHHSQNLLRAVSNMLQKARQTLEFYPCTSEEIDHEDITKDKTSTVEACLPLELTKNESCLNSRETSFITNGSCLASRKTSFMMALCLSSIYEDLKMYQVEFKTMNAKLLMDPKRQIFLDQNMLAVIDELMQALNFNSETVPQKSSLEEPDFYKTKIKLCILLHAFRIRAVTIDRVMSYLNAS

SEQ ID NO: 118 - protein, 887 aa, artificial
  LAG3-IGG1-YTE-LALA-IL12P40AA (ASKG129_CX14_51_5)
EVQLVESGGGLVQPGGSLRLSCAASGYTVSSYCMGWFRQAPGKGREGVSAIDSDGSVSYADSVKGRFTISKDNSKNTLYLQMNSLRAEDTAVYFCAADLCWVDQDQGEYNTWGQGTLVTVSSGSEPKSSDKTHTCPPCPAPEAAGGPSVFLFPPKPKDTLYITREPEVTCVVVDVSHEDPEVKFNWYVDGVEVHNAKTKPREEQYNSTYRVVSVLTVLHQDWLNGKEYKCKVSNKALPAPIEKTISKAKGQPREPQVYTLPPSREEMTKNQVSLTCLVKGFYPSDIAVEWESNGQPENNYKTTPPVLDSDGSFFLYSKLTVDKSRWQQGNVFSCSVMHEALHNHYTQKSLSLSPGGGGSGGGGSGGGGSIWELKKDVYVVELDWYPDAPGEMVVLTCDTPEEDGITWTLDQSSEVLGSGKTLTIQVKEFGDAGQYTCHKGGEVLSHSLLLLHKKEDGIWSTDILKDQKEPKNKTFLRCEAKNYSGRFTCWWLTTISTDLTFSVKSSRGSSDPQGVTCGAATLSAERVRGDNKEYEYSVECQEDSACPAAEESLPIEVMVDAVHKLKYENYTSSFFIRDIIKPDPPKNLQLKPLKNSRQVEVSWEYPDTWSTPHSYFSLTFCVQVQGKSAAEKKDRVFTDKTSATVICRKNASISVRAQDRYYSSSWSEWASVPCSGGGGSGGGGSGGGGSRNLPVATPDPGMFPCLHHSQNLLRAVSNMLQKARQTLEFYPCTSEEIDHEDITKDKTSTVEACLPLELTKNESCLNSRETSFITNGSCLASRKTSFMMALCLSSIYEDLKMYQVEFKTMNAKLLMDPKRQIFLDQNMLAVIDELMQALNFNSETVPQKSSLEEPDFYKTKIKLCILLHAFRIRAVTIDRVMSYLNAS

SEQ ID NO: 119 - protein, 887 aa, artificial
  LAG3-IGG1-YTE-LALA-IL12-T36A (ASKG129_CX14_70_1)
EVQLVESGGGLVQPGGSLRLSCAASGYTVSSYCMGWFRQAPGKGREGVSAIDSDGSVSYADSVKGRFTISKDNSKNTLYLQMNSLRAEDTAVYFCAADLCWVDQDQGEYNTWGQGTLVTVSSGSEPKSSDKTHTCPPCPAPEAAGGPSVFLFPPKPKDTLYITREPEVTCVVVDVSHEDPEVKFNWYVDGVEVHNAKTKPREEQYNSTYRVVSVLTVLHQDWLNGKEYKCKVSNKALPAPIEKTISKAKGQPREPQVYTLPPSREEMTKNQVSLTCLVKGFYPSDIAVEWESNGQPENNYKTTPPVLDSDGSFFLYSKLTVDKSRWQQGNVFSCSVMHEALHNHYTQKSLSLSPGGGGSGGGGSGGGGSIWELKKDVYVVELDWYPDAPGEMVVLTCDTPEEDGITWTLDQSSEVLGSGKTLTIQVKEFGDAGQYTCHKGGEVLSHSLLLLHKKEDGIWSTDILKDQKEPKNKTFLRCEAKNYSGRFTCWWLTTISTDLTFSVKSSRGSSDPQGVTCGAATLSAERVRGDNKEYEYSVECQEDSACPAAEESLPIEVMVDAVHKLKYENYTSSFFIRDIIKPDPPKNLQLKPLKNSRQVEVSWEYPDTWSTPHSYFSLTFCVQVQGKSKREKKDRVFTDKTSATVICRKNASISVRAQDRYYSSSWSEWASVPCSGGGGSGGGGSGGGGSRNLPVATPDPGMFPCLHHSQNLLRAVSNMLQKARQALEFYPCTSEEIDHEDITKDKTSTVEACLPLELTKNESCLNSRETSFITNGSCLASRKTSFMMALCLSSIYEDLKMYQVEFKTMNAKLLMDPKRQIFLDQNMLAVIDELMQALNFNSETVPQKSSLEEPDFYKTKIKLCILLHAFRIRAVTIDRVMSYLNAS

SEQ ID NO: 120 - protein, 887 aa, artificial
  LAG3-IGG1-YTE-LALA-IL12-L37E (ASKG129_CX14_70_2)
EVQLVESGGGLVQPGGSLRLSCAASGYTVSSYCMGWFRQAPGKGREGVSAIDSDGSVSYADSVKGRFTISKDNSKNTLYLQMNSLRAEDTAVYFCAADLCWVDQDQGEYNTWGQGTLVTVSSGSEPKSSDKTHTCPPCPAPEAAGGPSVFLFPPKPKDTLYITREPEVTCVVVDVSHEDPEVKFNWYVDGVEVHNAKTKPREEQYNSTYRVVSVLTVLHQDWLNGKEYKCKVSNKALPAPIEKTISKAKGQPREPQVYTLPPSREEMTKNQVSLTCLVKGFYPSDIAVEWESNGQPENNYKTTPPVLDSDGSFFLYSKLTVDKSRWQQGNVFSCSVMHEALHNHYTQKSLSLSPGGGGSGGGGSGGGGSIWELKKDVYVVELDWYPDAPGEMVVLTCDTPEEDGITWTLDQSSEVLGSGKTLTIQVKEFGDAGQYTCHKGGEVLSHSLLLLHKKEDGIWSTDILKDQKEPKNKTFLRCEAKNYSGRFTCWWLTTISTDLTFSVKSSRGSSDPQGVTCGAATLSAERVRGDNKEYEYSVECQEDSACPAAEESLPIEVMVDAVHKLKYENYTSSFFIRDIIKPDPPKNLQLKPLKNSRQVEVSWEYPDTWSTPHSYFSLTFCVQVQGKSKREKKDRVFTDKTSATVICRKNASISVRAQDRYYSSSWSEWASVPCSGGGGSGGGGSGGGGSRNLPVATPDPGMFPCLHHSQNLLRAVSNMLQKARQTEEFYPCTSEEIDHEDITKDKTSTVEACLPLELTKNESCLNSRETSFITNGSCLASRKTSFMMALCLSSIYEDLKMYQVEFKTMNAKLLMDPKRQIFLDQNMLAVIDELMQALNFNSETVPQKSSLEEPDFYKTKIKLCILLHAFRIRAVTIDRVMSYLNAS

SEQ ID NO: 121 - protein, 887 aa, artificial
  LAG3-IGG1-YTE-LALA-IL12-E38A (ASKG129_CX14_70_3)
EVQLVESGGGLVQPGGSLRLSCAASGYTVSSYCMGWFRQAPGKGREGVSAIDSDGSVSYADSVKGRFTISKDNSKNTLYLQMNSLRAEDTAVYFCAADLCWVDQDQGEYNTWGQGTLVTVSSGSEPKSSDKTHTCPPCPAPEAAGGPSVFLFPPKPKDTLYITREPEVTCVVVDVSHEDPEVKFNWYVDGVEVHNAKTKPREEQYNSTYRVVSVLTVLHQDWLNGKEYKCKVSNKALPAPIEKTISKAKGQPREPQVYTLPPSREEMTKNQVSLTCLVKGFYPSDIAVEWESNGQPENNYKTTPPVLDSDGSFFLYSKLTVDKSRWQQGNVFSCSVMHEALHNHYTQKSLSLSPGGGGSGGGGSGGGGSIWELKKDVYVVELDWYPDAPGEMVVLTCDTPEEDGITWTLDQSSEVLGSGKTLTIQVKEFGDAGQYTCHKGGEVLSHSLLLLHKKEDGIWSTDILKDQKEPKNKTFLRCEAKNYSGRFTCWWLTTISTDLTFSVKSSRGSSDPQGVTCGAATLSAERVRGDNKEYEYSVECQEDSACPAAEESLPIEVMVDAVHKLKYENYTSSFFIRDIIKPDPPKNLQLKPLKNSRQVEVSWEYPDTWSTPHSYFSLTFCVQVQGKSKREKKDRVFTDKTSATVICRKNASISVRAQDRYYSSSWSEWASVPCSGGGGSGGGGSGGGGSRNLPVATPDPGMFPCLHHSQNLLRAVSNMLQKARQTLAFYPCTSEEIDHEDITKDKTSTVEACLPLELTKNESCLNSRETSFITNGSCLASRKTSFMMALCLSSIYEDLKMYQVEFKTMNAKLLMDPKRQIFLDQNMLAVIDELMQALNFNSETVPQKSSLEEPDFYKTKIKLCILLHAFRIRAVTIDRVMSYLNAS

SEQ ID NO: 122 - protein, 887 aa, artificial
  LAG3-IGG1-YTE-LALA-IL12-F39A (ASKG129_CX14_70_4)
EVQLVESGGGLVQPGGSLRLSCAASGYTVSSYCMGWFRQAPGKGREGVSAIDSDGSVSYADSVKGRFTISKDNSKNTLYLQMNSLRAEDTAVYFCAADLCWVDQDQGEYNTWGQGTLVTVSSGSEPKSSDKTHTCPPCPAPEAAGGPSVFLFPPKPKDTLYITREPEVTCVVVDVSHEDPEVKFNWYVDGVEVHNAKTKPREEQYNSTYRVVSVLTVLHQDWLNGKEYKCKVSNKALPAPIEKTISKAKGQPREPQVYTLPPSREEMTKNQVSLTCLVKGFYPSDIAVEWESNGQPENNYKTTPPVLDSDGSFFLYSKLTVDKSRWQQGNVFSCSVMHEALHNHYTQKSLSLSPGGGGSGGGGSGGGGSIWELKKDVYVVELDWYPDAPGEMVVLTCDTPEEDGITWTLDQSSEVLGSGKTLTIQVKEFGDAGQYTCHKGGEVLSHSLLLLHKKEDGIWSTDILKDQKEPKNKTFLRCEAKNYSGRFTCWWLTTISTDLTFSVKSSRGSSDPQGVTCGAATLSAERVRGDNKEYEYSVECQEDSACPAAEESLPIEVMVDAVHKLKYENYTSSFFIRDIIKPDPPKNLQLKPLKNSRQVEVSWEYPDTWSTPHSYFSLTFCVQVQGKSKREKKDRVFTDKTSATVICRKNASISVRAQDRYYSSSWSEWASVPCSGGGGSGGGGSGGGGSRNLPVATPDPGMFPCLHHSQNLLRAVSNMLQKARQTLEAYPCTSEEIDHEDITKDKTSTVEACLPLELTKNESCLNSRETSFITNGSCLASRKTSFMMALCLSSIYEDLKMYQVEFKTMNAKLLMDPKRQIFLDQNMLAVIDELMQALNFNSETVPQKSSLEEPDFYKTKIKLCILLHAFRIRAVTIDRVMSYLNAS

SEQ ID NO: 123 - protein, 887 aa, artificial
  LAG3-IGG1-YTE-LALA-IL12-P41G (ASKG129_CX14_70_5)
EVQLVESGGGLVQPGGSLRLSCAASGYTVSSYCMGWFRQAPGKGREGVSAIDSDGSVSYADSVKGRFTISKDNSKNTLYLQMNSLRAEDTAVYFCAADLCWVDQDQGEYNTWGQGTLVTVSSGSEPKSSDKTHTCPPCPAPEAAGGPSVFLFPPKPKDTLYITREPEVTCVVVDVSHEDPEVKFNWYVDGVEVHNAKTKPREEQYNSTYRVVSVLTVLHQDWLNGKEYKCKVSNKALPAPIEKTISKAKGQPREPQVYTLPPSREEMTKNQVSLTCLVKGFYPSDIAVEWESNGQPENNYKTTPPVLDSDGSFFLYSKLTVDKSRWQQGNVFSCSVMHEALHNHYTQKSLSLSPGGGGSGGGGSGGGGSIWELKKDVYVVELDWYPDAPGEMVVLTCDTPEEDGITWTLDQSSEVLGSGKTLTIQVKEFGDAGQYTCHKGGEVLSHSLLLLHKKEDGIWSTDILKDQKEPKNKTFLRCEAKNYSGRFTCWWLTTISTDLTFSVKSSRGSSDPQGVTCGAATLSAERVRGDNKEYEYSVECQEDSACPAAEESLPIEVMVDAVHKLKYENYTSSFFIRDIIKPDPPKNLQLKPLKNSRQVEVSWEYPDTWSTPHSYFSLTFCVQVQGKSKREKKDRVFTDKTSATVICRKNASISVRAQDRYYSSSWSEWASVPCSGGGGSGGGGSGGGGSRNLPVATPDPGMFPCLHHSQNLLRAVSNMLQKARQTLEFYGCTSEEIDHEDITKDKTSTVEACLPLELTKNESCLNSRETSFITNGSCLASRKTSFMMALCLSSIYEDLKMYQVEFKTMNAKLLMDPKRQIFLDQNMLAVIDELMQALNFNSETVPQKSSLEEPDFYKTKIKLCILLHAFRIRAVTIDRVMSYLNAS

SEQ ID NO: 124 - protein, 887 aa, artificial
  LAG3-IGG1-YTE-LALA-IL12-wt (ASKG129_CX14_51_3)
EVQLVESGGGLVQPGGSLRLSCAASGYTVSSYCMGWFRQAPGKGREGVSAIDSDGSVSYADSVKGRFTISKDNSKNTLYLQMNSLRAEDTAVYFCAADLCWVDQDQGEYNTWGQGTLVTVSSGSEPKSSDKTHTCPPCPAPEAAGGPSVFLFPPKPKDTLYITREPEVTCVVVDVSHEDPEVKFNWYVDGVEVHNAKTKPREEQYNSTYRVVSVLTVLHQDWLNGKEYKCKVSNKALPAPIEKTISKAKGQPREPQVYTLPPSREEMTKNQVSLTCLVKGFYPSDIAVEWESNGQPENNYKTTPPVLDSDGSFFLYSKLTVDKSRWQQGNVFSCSVMHEALHNHYTQKSLSLSPGGGGSGGGGSGGGGSIWELKKDVYVVELDWYPDAPGEMVVLTCDTPEEDGITWTLDQSSEVLGSGKTLTIQVKEFGDAGQYTCHKGGEVLSHSLLLLHKKEDGIWSTDILKDQKEPKNKTFLRCEAKNYSGRFTCWWLTTISTDLTFSVKSSRGSSDPQGVTCGAATLSAERVRGDNKEYEYSVECQEDSACPAAEESLPIEVMVDAVHKLKYENYTSSFFIRDIIKPDPPKNLQLKPLKNSRQVEVSWEYPDTWSTPHSYFSLTFCVQVQGKSKREKKDRVFTDKTSATVICRKNASISVRAQDRYYSSSWSEWASVPCSGGGGSGGGGSGGGGSRNLPVATPDPGMFPCLHHSQNLLRAVSNMLQKARQTLEFYPCTSEEIDHEDITKDKTSTVEACLPLELTKNESCLNSRETSFITNGSCLASRKTSFMMALCLSSIYEDLKMYQVEFKTMNAKLLMDPKRQIFLDQNMLAVIDELMQALNFNSETVPQKSSLEEPDFYKTKIKLCILLHAFRIRAVTIDRVMSYLNAS

SEQ ID NO: 125 - protein, 981 aa, artificial
  PD-1-Antibody - IL-12 WT (ASKG129_CX14_77_1)
QVQLVQSGVEVKKPGASVKVSCKASGYTFTNYYMYWVRQAPGQGLEWMGGINPSNGGTNFNEKFKNRVTLTTDSSTTTAYMELKSLQFDDTAVYYCARRDYRFDMGFDYWGQGTTVTVSSASTKGPSVFPLAPSSKSTSGGTAALGCLVKDYFPEPVTVSWNSGALTSGVHTFPAVLQSSGLYSLSSVVTVPSSSLGTQTYICNVNHKPSNTKVDKKAEPKSCDKTHTCPPCPAPEAAGAPSVFLFPPKPKDTLYITREPEVTCVVVDVSHEDPEVKFNWYVDGVEVHNAKTKPREEQYNSTYRVVSVLTVLHQDWLNGKEYKCKVSNKALPAPIEKTISKAKGQPREPQVYTLPPSREEMTKNQVSLTCLVKGFYPSDIAVEWESNGQPENNYKTTPPVLDSDGSFFLYSKLTVDKSRWQQGNVFSCSVMHEALHNHYTQKSLSLSPGGGGSGGGGSGGGGSIWELKKDVYVVELDWYPDAPGEMVVLTCDTPEEDGITWTLDQSSEVLGSGKTLTIQVKEFGDAGQYTCHKGGEVLSHSLLLLHKKEDGIWSTDILKDQKEPKNKTFLRCEAKNYSGRFTCWWLTTISTDLTFSVKSSRGSSDPQGVTCGAATLSAERVRGDNKEYEYSVECQEDSACPAAEESLPIEVMVDAVHKLKYENYTSSFFIRDIIKPDPPKNLQLKPLKNSRQVEVSWEYPDTWSTPHSYFSLTFCVQVQGKSKREKKDRVFTDKTSATVICRKNASISVRAQDRYYSSSWSEWASVPCSGGGGSGGGGSGGGGSRNLPVATPDPGMFPCLHHSQNLLRAVSNMLQKARQTLEFYPCTSEEIDHEDITKDKTSTVEACLPLELTKNESCLNSRETSFITNGSCLASRKTSFMMALCLSSIYEDLKMYQVEFKTMNAKLLMDPKRQIFLDQNMLAVIDELMQALNFNSETVPQKSSLEEPDFYKTKIKLCILLHAFRIRAVTIDRVMSYLNAS

SEQ ID NO: 126 - protein, 981 aa, artificial
  129K-PD1-IL-12-P35-Y40A (ASKG129_CX14_77_2)
QVQLVQSGVEVKKPGASVKVSCKASGYTFTNYYMYWVRQAPGQGLEWMGGINPSNGGTNFNEKFKNRVTLTTDSSTTTAYMELKSLQFDDTAVYYCARRDYRFDMGFDYWGQGTTVTVSSASTKGPSVFPLAPSSKSTSGGTAALGCLVKDYFPEPVTVSWNSGALTSGVHTFPAVLQSSGLYSLSSVVTVPSSSLGTQTYICNVNHKPSNTKVDKKAEPKSCDKTHTCPPCPAPEAAGAPSVFLFPPKPKDTLYITREPEVTCVVVDVSHEDPEVKFNWYVDGVEVHNAKTKPREEQYNSTYRVVSVLTVLHQDWLNGKEYKCKVSNKALPAPIEKTISKAKGQPREPQVYTLPPSREEMTKNQVSLTCLVKGFYPSDIAVEWESNGQPENNYKTTPPVLDSDGSFFLYSKLTVDKSRWQQGNVFSCSVMHEALHNHYTQKSLSLSPGGGGSGGGGSGGGGSIWELKKDVYVVELDWYPDAPGEMVVLTCDTPEEDGITWTLDQSSEVLGSGKTLTIQVKEFGDAGQYTCHKGGEVLSHSLLLLHKKEDGIWSTDILKDQKEPKNKTFLRCEAKNYSGRFTCWWLTTISTDLTFSVKSSRGSSDPQGVTCGAATLSAERVRGDNKEYEYSVECQEDSACPAAEESLPIEVMVDAVHKLKYENYTSSFFIRDIIKPDPPKNLQLKPLKNSRQVEVSWEYPDTWSTPHSYFSLTFCVQVQGKSKREKKDRVFTDKTSATVICRKNASISVRAQDRYYSSSWSEWASVPCSGGGGSGGGGSGGGGSRNLPVATPDPGMFPCLHHSQNLLRAVSNMLQKARQTLEFAPCTSEEIDHEDITKDKTSTVEACLPLELTKNESCLNSRETSFITNGSCLASRKTSFMMALCLSSIYEDLKMYQVEFKTMNAKLLMDPKRQIFLDQNMLAVIDELMQALNFNSETVPQKSSLEEPDFYKTKIKLCILLHAFRIRAVTIDRVMSYLNAS

SEQ ID NO: 127 - protein, 981 aa, artificial
  129K-PD1-IL-12P40AA (ASKG129_CX14_77_3)
QVQLVQSGVEVKKPGASVKVSCKASGYTFTNYYMYWVRQAPGQGLEWMGGINPSNGGTNFNEKFKNRVTLTTDSSTTTAYMELKSLQFDDTAVYYCARRDYRFDMGFDYWGQGTTVTVSSASTKGPSVFPLAPSSKSTSGGTAALGCLVKDYFPEPVTVSWNSGALTSGVHTFPAVLQSSGLYSLSSVVTVPSSSLGTQTYICNVNHKPSNTKVDKKAEPKSCDKTHTCPPCPAPEAAGAPSVFLFPPKPKDTLYITREPEVTCVVVDVSHEDPEVKFNWYVDGVEVHNAKTKPREEQYNSTYRVVSVLTVLHQDWLNGKEYKCKVSNKALPAPIEKTISKAKGQPREPQVYTLPPSREEMTKNQVSLTCLVKGFYPSDIAVEWESNGQPENNYKTTPPVLDSDGSFFLYSKLTVDKSRWQQGNVFSCSVMHEALHNHYTQKSLSLSPGGGGSGGGGSGGGGSIWELKKDVYVVELDWYPDAPGEMVVLTCDTPEEDGITWTLDQSSEVLGSGKTLTIQVKEFGDAGQYTCHKGGEVLSHSLLLLHKKEDGIWSTDILKDQKEPKNKTFLRCEAKNYSGRFTCWWLTTISTDLTFSVKSSRGSSDPQGVTCGAATLSAERVRGDNKEYEYSVECQEDSACPAAEESLPIEVMVDAVHKLKYENYTSSFFIRDIIKPDPPKNLQLKPLKNSRQVEVSWEYPDTWSTPHSYFSLTFCVQVQGKSAAEKKDRVFTDKTSATVICRKNASISVRAQDRYYSSSWSEWASVPCSGGGGSGGGGSGGGGSRNLPVATPDPGMFPCLHHSQNLLRAVSNMLQKARQTLEFYPCTSEEIDHEDITKDKTSTVEACLPLELTKNESCLNSRETSFITNGSCLASRKTSFMMALCLSSIYEDLKMYQVEFKTMNAKLLMDPKRQIFLDQNMLAVIDELMQALNFNSETVPQKSSLEEPDFYKTKIKLCILLHAFRIRAVTIDRVMSYLNAS

SEQ ID NO: 128 - protein, 712 aa, artificial
  129K-PD1-Umask (ASKG129_CX14_77_4)
QVQLVQSGVEVKKPGASVKVSCKASGYTFTNYYMYWVRQAPGQGLEWMGGINPSNGGTNFNEKFKNRVTLTTDSSTTTAYMELKSLQFDDTAVYYCARRDYRFDMGFDYWGQGTTVTVSSASTKGPSVFPLAPSSKSTSGGTAALGCLVKDYFPEPVTVSWNSGALTSGVHTFPAVLQSSGLYSLSSVVTVPSSSLGTQTYICNVNHKPSNTKVDKKAEPKSCDKTHTCPPCPAPEAAGAPSVFLFPPKPKDTLYITREPEVTCVVVDVSHEDPEVKFNWYVDGVEVHNAKTKPREEQYNSTYRVVSVLTVLHQDWLNGKEYKCKVSNKALPAPIEKTISKAKGQPREPQVYTLPPSREEMTKNQVSLTCLVKGFYPSDIAVEWESNGQPENNYKTTPPVLDSDGSFFLYSKLTVDKSRWQQGNVFSCSVMHEALHNHYTQKSLSLSPGGGGSGGGGSAAGGGGSGGGGSDIQMTQSPSSLSASVGDRVTITCRASQGISSWLAWYQQKPEKAPKSLIYAASSLQSGVPSRFSGSGSGTDFTLTISSLQPEDFATYYCQQYNIYPYTFGQGTKLEIKSGGGGSGGGGSGGGGSEVQLVQSGAEVKKPGESLKISCKGSGYSFTTYWLGWVRQMPGKGLDWIGIMSPVDSDIRYSPSFQGQVTMSVDKSITTAYLQWNSLKASDTAMYYCARRRPGQGYFDFWGQGTLVTVSS

SEQ ID NO: 129 - protein, 218 aa, artificial
  LC (CX11_135_1)
EIVLTQSPATLSLSPGERATLSCRASKGVSTSGYSYLHWYQQKPGQAPRLLIYLASYLESGVPARFSGSGSGTDFTLTISSLEPEDFAVYYCQHSRDLPLTFGGGTKVEIKRTVAAPSVFIFPPSDEQLKSGTASVVCLLNNFYPREAKVQWKVDNALQSGNSQESVTEQDSKDSTYSLSSTLTLSKADYEKHKVYACEVTHQGLSSPVTKSFNRGEC

SEQ ID NO: 130 - protein, 981 aa, artificial
  Seq1-PD1-HC-LALA, G237A, IL-12wt Knob (ASKG129_CX14_98_1)
QVQLVQSGVEVKKPGASVKVSCKASGYTFTNYYMYWVRQAPGQGLEWMGGINPSNGGTNFNEKFKNRVTLTTDSSTTTAYMELKSLQFDDTAVYYCARRDYRFDMGFDYWGQGTTVTVSSASTKGPSVFPLAPSSKSTSGGTAALGCLVKDYFPEPVTVSWNSGALTSGVHTFPAVLQSSGLYSLSSVVTVPSSSLGTQTYICNVNHKPSNTKVDKKVEPKSCDKTHTCPPCPAPEAAGAPSVFLFPPKPKDTLMISRTPEVTCVVVDVSHEDPEVKFNWYVDGVEVHNAKTKPREEQYNSTYRVVSVLTVLHQDWLNGKEYKCKVSNKALPAPIEKTISKAKGQPREPQVYTLPPCREEMTKNQVSLWCLVKGFYPSDIAVEWESNGQPENNYKTTPPVLDSDGSFFLYSKLTVDKSRWQQGNVFSCSVMHEALHNHYTQKSLSLSPGGGGSGGGGSGGGGSIWELKKDVYVVELDWYPDAPGEMVVLTCDTPEEDGITWTLDQSSEVLGSGKTLTIQVKEFGDAGQYTCHKGGEVLSHSLLLLHKKEDGIWSTDILKDQKEPKNKTFLRCEAKNYSGRFTCWWLTTISTDLTFSVKSSRGSSDPQGVTCGAATLSAERVRGDNKEYEYSVECQEDSACPAAEESLPIEVMVDAVHKLKYENYTSSFFIRDIIKPDPPKNLQLKPLKNSRQVEVSWEYPDTWSTPHSYFSLTFCVQVQGKSKREKKDRVFTDKTSATVICRKNASISVRAQDRYYSSSWSEWASVPCSGGGGSGGGGSGGGGSRNLPVATPDPGMFPCLHHSQNLLRAVSNMLQKARQTLEFYPCTSEEIDHEDITKDKTSTVEACLPLELTKNESCLNSRETSFITNGSCLASRKTSFMMALCLSSIYEDLKMYQVEFKTMNAKLLMDPKRQIFLDQNMLAVIDELMQALNFNSETVPQKSSLEEPDFYKTKIKLCILLHAFRIRAVTIDRVMSYLNAS

SEQ ID NO: 131 - protein, 981 aa, artificial
  Seq2-PD1-HC-LALA, G237A, IL-12-P35Y40A-Knob (ASKG129_CX14_98_2)
QVQLVQSGVEVKKPGASVKVSCKASGYTFTNYYMYWVRQAPGQGLEWMGGINPSNGGTNFNEKFKNRVTLTTDSSTTTAYMELKSLQFDDTAVYYCARRDYRFDMGFDYWGQGTTVTVSSASTKGPSVFPLAPSSKSTSGGTAALGCLVKDYFPEPVTVSWNSGALTSGVHTFPAVLQSSGLYSLSSVVTVPSSSLGTQTYICNVNHKPSNTKVDKKVEPKSCDKTHTCPPCPAPEAAGAPSVFLFPPKPKDTLMISRTPEVTCVVVDVSHEDPEVKFNWYVDGVEVHNAKTKPREEQYNSTYRVVSVLTVLHQDWLNGKEYKCKVSNKALPAPIEKTISKAKGQPREPQVYTLPPCREEMTKNQVSLWCLVKGFYPSDIAVEWESNGQPENNYKTTPPVLDSDGSFFLYSKLTVDKSRWQQGNVFSCSVMHEALHNHYTQKSLSLSPGGGGSGGGGSGGGGSIWELKKDVYVVELDWYPDAPGEMVVLTCDTPEEDGITWTLDQSSEVLGSGKTLTIQVKEFGDAGQYTCHKGGEVLSHSLLLLHKKEDGIWSTDILKDQKEPKNKTFLRCEAKNYSGRFTCWWLTTISTDLTFSVKSSRGSSDPQGVTCGAATLSAERVRGDNKEYEYSVECQEDSACPAAEESLPIEVMVDAVHKLKYENYTSSFFIRDIIKPDPPKNLQLKPLKNSRQVEVSWEYPDTWSTPHSYFSLTFCVQVQGKSKREKKDRVFTDKTSATVICRKNASISVRAQDRYYSSSWSEWASVPCSGGGGSGGGGSGGGGSRNLPVATPDPGMFPCLHHSQNLLRAVSNMLQKARQTLEFAPCTSEEIDHEDITKDKTSTVEACLPLELTKNESCLNSRETSFITNGSCLASRKTSFMMALCLSSIYEDLKMYQVEFKTMNAKLLMDPKRQIFLDQNMLAVIDELMQALNFNSETVPQKSSLEEPDFYKTKIKLCILLHAFRIRAVTIDRVMSYLNAS

SEQ ID NO: 132 - protein, 981 aa, artificial
  Seq3-PD1-HC-LALA, G237A, IL-12-P40AA-knob (ASKG129_CX14_98_3)
QVQLVQSGVEVKKPGASVKVSCKASGYTFTNYYMYWVRQAPGQGLEWMGGINPSNGGTNFNEKFKNRVTLTTDSSTTTAYMELKSLQFDDTAVYYCARRDYRFDMGFDYWGQGTTVTVSSASTKGPSVFPLAPSSKSTSGGTAALGCLVKDYFPEPVTVSWNSGALTSGVHTFPAVLQSSGLYSLSSVVTVPSSSLGTQTYICNVNHKPSNTKVDKKVEPKSCDKTHTCPPCPAPEAAGAPSVFLFPPKPKDTLMISRTPEVTCVVVDVSHEDPEVKFNWYVDGVEVHNAKTKPREEQYNSTYRVVSVLTVLHQDWLNGKEYKCKVSNKALPAPIEKTISKAKGQPREPQVYTLPPCREEMTKNQVSLWCLVKGFYPSDIAVEWESNGQPENNYKTTPPVLDSDGSFFLYSKLTVDKSRWQQGNVFSCSVMHEALHNHYTQKSLSLSPGGGGSGGGGSGGGGSIWELKKDVYVVELDWYPDAPGEMVVLTCDTPEEDGITWTLDQSSEVLGSGKTLTIQVKEFGDAGQYTCHKGGEVLSHSLLLLHKKEDGIWSTDILKDQKEPKNKTFLRCEAKNYSGRFTCWWLTTISTDLTFSVKSSRGSSDPQGVTCGAATLSAERVRGDNKEYEYSVECQEDSACPAAEESLPIEVMVDAVHKLKYENYTSSFFIRDIIKPDPPKNLQLKPLKNSRQVEVSWEYPDTWSTPHSYFSLTFCVQVQGKSAAEKKDRVFTDKTSATVICRKNASISVRAQDRYYSSSWSEWASVPCSGGGGSGGGGSGGGGSRNLPVATPDPGMFPCLHHSQNLLRAVSNMLQKARQTLEFYPCTSEEIDHEDITKDKTSTVEACLPLELTKNESCLNSRETSFITNGSCLASRKTSFMMALCLSSIYEDLKMYQVEFKTMNAKLLMDPKRQIFLDQNMLAVIDELMQALNFNSETVPQKSSLEEPDFYKTKIKLCILLHAFRIRAVTIDRVMSYLNAS

SEQ ID NO: 133 - protein, 976 aa, artificial
  Seq1-PD1-HC-LALA, G237A, IL-12wt Knob with Shorter Linker in IL-12
QVQLVQSGVEVKKPGASVKVSCKASGYTFTNYYMYWVRQAPGQGLEWMGGINPSNGGTNFNEKFKNRVTLTTDSSTTTAYMELKSLQFDDTAVYYCARRDYRFDMGFDYWGQGTTVTVSSASTKGPSVFPLAPSSKSTSGGTAALGCLVKDYFPEPVTVSWNSGALTSGVHTFPAVLQSSGLYSLSSVVTVPSSSLGTQTYICNVNHKPSNTKVDKKVEPKSCDKTHTCPPCPAPEAAGAPSVFLFPPKPKDTLMISRTPEVTCVVVDVSHEDPEVKFNWYVDGVEVHNAKTKPREEQYNSTYRVVSVLTVLHQDWLNGKEYKCKVSNKALPAPIEKTISKAKGQPREPQVYTLPPCREEMTKNQVSLWCLVKGFYPSDIAVEWESNGQPENNYKTTPPVLDSDGSFFLYSKLTVDKSRWQQGNVFSCSVMHEALHNHYTQKSLSLSPGGGGSGGGGSGGGGSIWELKKDVYVVELDWYPDAPGEMVVLTCDTPEEDGITWTLDQSSEVLGSGKTLTIQVKEFGDAGQYTCHKGGEVLSHSLLLLHKKEDGIWSTDILKDQKEPKNKTFLRCEAKNYSGRFTCWWLTTISTDLTFSVKSSRGSSDPQGVTCGAATLSAERVRGDNKEYEYSVECQEDSACPAAEESLPIEVMVDAVHKLKYENYTSSFFIRDIIKPDPPKNLQLKPLKNSRQVEVSWEYPDTWSTPHSYFSLTFCVQVQGKSKREKKDRVFTDKTSATVICRKNASISVRAQDRYYSSSWSEWASVPCSGGGGSGGGGSRNLPVATPDPGMFPCLHHSQNLLRAVSNMLQKARQTLEFYPCTSEEIDHEDITKDKTSTVEACLPLELTKNESCLNSRETSFITNGSCLASRKTSFMMALCLSSIYEDLKMYQVEFKTMNAKLLMDPKRQIFLDQNMLAVIDELMQALNFNSETVPQKSSLEEPDFYKTKIKLCILLHAFRIRAVTIDRVMSYLNAS

SEQ ID NO: 134 - protein, 976 aa, artificial
  Seq2-PD1-HC-LALA, G237A, IL-12-P35Y40A-Knob with Shorter Linker in IL-12
QVQLVQSGVEVKKPGASVKVSCKASGYTFTNYYMYWVRQAPGQGLEWMGGINPSNGGTNFNEKFKNRVTLTTDSSTTTAYMELKSLQFDDTAVYYCARRDYRFDMGFDYWGQGTTVTVSSASTKGPSVFPLAPSSKSTSGGTAALGCLVKDYFPEPVTVSWNSGALTSGVHTFPAVLQSSGLYSLSSVVTVPSSSLGTQTYICNVNHKPSNTKVDKKVEPKSCDKTHTCPPCPAPEAAGAPSVFLFPPKPKDTLMISRTPEVTCVVVDVSHEDPEVKFNWYVDGVEVHNAKTKPREEQYNSTYRVVSVLTVLHQDWLNGKEYKCKVSNKALPAPIEKTISKAKGQPREPQVYTLPPCREEMTKNQVSLWCLVKGFYPSDIAVEWESNGQPENNYKTTPPVLDSDGSFFLYSKLTVDKSRWQQGNVFSCSVMHEALHNHYTQKSLSLSPGGGGSGGGGSGGGGSIWELKKDVYVVELDWYPDAPGEMVVLTCDTPEEDGITWTLDQSSEVLGSGKTLTIQVKEFGDAGQYTCHKGGEVLSHSLLLLHKKEDGIWSTDILKDQKEPKNKTFLRCEAKNYSGRFTCWWLTTISTDLTFSVKSSRGSSDPQGVTCGAATLSAERVRGDNKEYEYSVECQEDSACPAAEESLPIEVMVDAVHKLKYENYTSSFFIRDIIKPDPPKNLQLKPLKNSRQVEVSWEYPDTWSTPHSYFSLTFCVQVQGKSKREKKDRVFTDKTSATVICRKNASISVRAQDRYYSSSWSEWASVPCSGGGGSGGGGSRNLPVATPDPGMFPCLHHSQNLLRAVSNMLQKARQTLEFAPCTSEEIDHEDITKDKTSTVEACLPLELTKNESCLNSRETSFITNGSCLASRKTSFMMALCLSSIYEDLKMYQVEFKTMNAKLLMDPKRQIFLDQNMLAVIDELMQALNFNSETVPQKSSLEEPDFYKTKIKLCILLHAFRIRAVTIDRVMSYLNAS

SEQ ID NO: 135 - protein, 976 aa, artificial
  Seq3-PD1-HC-LALA, G237A, IL-12-P40AA-knob with Shorter Linker in IL-12
QVQLVQSGVEVKKPGASVKVSCKASGYTFTNYYMYWVRQAPGQGLEWMGGINPSNGGTNFNEKFKNRVTLTTDSSTTTAYMELKSLQFDDTAVYYCARRDYRFDMGFDYWGQGTTVTVSSASTKGPSVFPLAPSSKSTSGGTAALGCLVKDYFPEPVTVSWNSGALTSGVHTFPAVLQSSGLYSLSSVVTVPSSSLGTQTYICNVNHKPSNTKVDKKVEPKSCDKTHTCPPCPAPEAAGAPSVFLFPPKPKDTLMISRTPEVTCVVVDVSHEDPEVKFNWYVDGVEVHNAKTKPREEQYNSTYRVVSVLTVLHQDWLNGKEYKCKVSNKALPAPIEKTISKAKGQPREPQVYTLPPCREEMTKNQVSLWCLVKGFYPSDIAVEWESNGQPENNYKTTPPVLDSDGSFFLYSKLTVDKSRWQQGNVFSCSVMHEALHNHYTQKSLSLSPGGGGSGGGGSGGGGSIWELKKDVYVVELDWYPDAPGEMVVLTCDTPEEDGITWTLDQSSEVLGSGKTLTIQVKEFGDAGQYTCHKGGEVLSHSLLLLHKKEDGIWSTDILKDQKEPKNKTFLRCEAKNYSGRFTCWWLTTISTDLTFSVKSSRGSSDPQGVTCGAATLSAERVRGDNKEYEYSVECQEDSACPAAEESLPIEVMVDAVHKLKYENYTSSFFIRDIIKPDPPKNLQLKPLKNSRQVEVSWEYPDTWSTPHSYFSLTFCVQVQGKSAAEKKDRVFTDKTSATVICRKNASISVRAQDRYYSSSWSEWASVPCSGGGGSGGGGSRNLPVATPDPGMFPCLHHSQNLLRAVSNMLQKARQTLEFYPCTSEEIDHEDITKDKTSTVEACLPLELTKNESCLNSRETSFITNGSCLASRKTSFMMALCLSSIYEDLKMYQVEFKTMNAKLLMDPKRQIFLDQNMLAVIDELMQALNFNSETVPQKSSLEEPDFYKTKIKLCILLHAFRIRAVTIDRVMSYLNAS

SEQ ID NO: 136 - protein, 712 aa, artificial
  Seq4-PD1-HC-LALA, G237A- mask-hole?ASKG129_CX14_98_4?
QVQLVQSGVEVKKPGASVKVSCKASGYTFTNYYMYWVRQAPGQGLEWMGGINPSNGGTNFNEKFKNRVTLTTDSSTTTAYMELKSLQFDDTAVYYCARRDYRFDMGFDYWGQGTTVTVSSASTKGPSVFPLAPSSKSTSGGTAALGCLVKDYFPEPVTVSWNSGALTSGVHTFPAVLQSSGLYSLSSVVTVPSSSLGTQTYICNVNHKPSNTKVDKKVEPKSCDKTHTCPPCPAPEAAGAPSVFLFPPKPKDTLMISRTPEVTCVVVDVSHEDPEVKFNWYVDGVEVHNAKTKPREEQYNSTYRVVSVLTVLHQDWLNGKEYKCKVSNKALPAPIEKTISKAKGQPREPQVCTLPPSREEMTKNQVSLSCAVKGFYPSDIAVEWESNGQPENNYKTTPPVLDSDGSFFLVSKLTVDKSRWQQGNVFSCSVMHEALHNHYTQKSLSLSPGGGGSGGGGSAAGGGGSGGGGSDIQMTQSPSSLSASVGDRVTITCRASQGISSWLAWYQQKPEKAPKSLIYAASSLQSGVPSRFSGSGSGTDFTLTISSLQPEDFATYYCQQYNIYPYTFGQGTKLEIKSGGGGSGGGGSGGGGSEVQLVQSGAEVKKPGESLKISCKGSGYSFTTYWLGWVRQMPGKGLDWIGIMSPVDSDIRYSPSFQGQVTMSVDKSITTAYLQWNSLKASDTAMYYCARRRPGQGYFDFWGQGTLVTVSS

SEQ ID NO: 137 - protein, 887 aa, artificial
  LAG3-IGG1-YTE-LALA-IL12-Y40A (ASKG129_CX14_51_4)
EVQLVESGGGLVQPGGSLRLSCAASGYTVSSYCMGWFRQAPGKGREGVSAIDSDGSVSYADSVKGRFTISKDNSKNTLYLQMNSLRAEDTAVYFCAADLCWVDQDQGEYNTWGQGTLVTVSSGSEPKSSDKTHTCPPCPAPEAAGGPSVFLFPPKPKDTLYITREPEVTCVVVDVSHEDPEVKFNWYVDGVEVHNAKTKPREEQYNSTYRVVSVLTVLHQDWLNGKEYKCKVSNKALPAPIEKTISKAKGQPREPQVYTLPPSREEMTKNQVSLTCLVKGFYPSDIAVEWESNGQPENNYKTTPPVLDSDGSFFLYSKLTVDKSRWQQGNVFSCSVMHEALHNHYTQKSLSLSPGGGGSGGGGSGGGGSIWELKKDVYVVELDWYPDAPGEMVVLTCDTPEEDGITWTLDQSSEVLGSGKTLTIQVKEFGDAGQYTCHKGGEVLSHSLLLLHKKEDGIWSTDILKDQKEPKNKTFLRCEAKNYSGRFTCWWLTTISTDLTFSVKSSRGSSDPQGVTCGAATLSAERVRGDNKEYEYSVECQEDSACPAAEESLPIEVMVDAVHKLKYENYTSSFFIRDIIKPDPPKNLQLKPLKNSRQVEVSWEYPDTWSTPHSYFSLTFCVQVQGKSKREKKDRVFTDKTSATVICRKNASISVRAQDRYYSSSWSEWASVPCSGGGGSGGGGSGGGGSRNLPVATPDPGMFPCLHHSQNLLRAVSNMLQKARQTLEFAPCTSEEIDHEDITKDKTSTVEACLPLELTKNESCLNSRETSFITNGSCLASRKTSFMMALCLSSIYEDLKMYQVEFKTMNAKLLMDPKRQIFLDQNMLAVIDELMQALNFNSETVPQKSSLEEPDFYKTKIKLCILLHAFRIRAVTIDRVMSYLNAS
